(19) United States
(12) Patent Application Publication
(10) Pub. No.: US 2007/0006344 A1
(43) Pub. Date: Jan. 4, 2007

(54) Regulatory sequences for expressing gene products in plant reproductive tissue

(75) Inventors: Michael L. Nuccio, Research Triangle Park, NC (US); L. Mark Lagrimini, Apex, NC (US); Moez Meghji, Bloomington, IL (US)

Correspondence Address: SYNGENTA BIOTECHNOLOGY, INC.;PATENT DEPARTMENT, 3054 CORNWALLIS ROAD, P.O. BOX 12257, RESEARCH TRIANGLE PARK, NC, 27709-2257, US

(73) Assignee: Syngenta Participations AG

(21) Appl. No.: 11/109,594

(22) Filed: Apr. 19, 2005

Related U.S. Application Data
(60) Provisional application No. 60/563,687, filed on Apr. 20, 2004.
(60) Provisional application No. 60/563,678, filed on Apr. 20, 2004.

(51) Int. Cl. A01H 1/00; C12N 15/82; C12N 5/04

(52) U.S. Cl. 800/284; 435/419; 435/468

(57) ABSTRACT

Expression cassettes causing specific regulatory control of transgene expression in plants, wherein the expression cassettes include regulatory sequences from the MADS gene family for expression of recombinant gene products in the reproductive tissue of plants for the purpose of generating abiotic stress tolerant plants.

### REFERENCE TO MATERIAL SUBMITTED ON COMPACT DISC

[0001] The Sequence Listing associated with the instant disclosure has been submitted as a 1.04 MB file on CD-R (in duplicate) instead of paper. Each CD-R is marked in indelible ink to identify the Applicants, Title, File Name (70369USNP.ST25.txt), Creation Date (Aug. 14, 2006), Computer System (IBM-PC/MS-DOS/MS-Windows), and Docket No. (70369USNP). The Sequence Listing submitted on CD-R is hereby incorporated by reference into the instant disclosure.

### FIELD OF THE INVENTION

[0002] The present invention includes expression cassettes that contain regulatory sequences derived from a target gene, for example, regulatory sequences from the MADS gene family, for tissue specific expression of recombinant gene products in plants.

### BACKGROUND OF THE INVENTION

[0003] In agricultural biotechnology, plants can be modified according to one's needs. One way to accomplish this is by using modern genetic engineering techniques. For example, by introducing a gene of interest into a plant, the plant can be specifically modified to express a desirable phenotypic trait. For this, plants are transformed most commonly with a heterologous gene comprising a promoter region, a coding region and a termination region. When genetically engineering a heterologous gene for expression in plants, the selection of a promoter is often a critical factor. While it may be desirable to express certain genes constitutively, i.e. throughout the plant at all times and in most tissues and organs, other genes are more desirably expressed only in response to particular stimuli or confined to specific cells or tissues.

[0004] Promoters consist of several regions that are necessary for full function of the promoter. Some of these regions are modular, in other words they can be used in isolation to confer promoter activity or they may be assembled with other elements to construct new promoters. The first of these promoter regions lies immediately upstream of the coding sequence and forms the “core promoter region” containing consensus sequences, normally 20-70 base pairs immediately upstream of the coding sequence. The core promoter region contains a TATA box and often an initiator element as well as the initiation site. The precise length of the core promoter region is not fixed but is usually well recognizable. Such a region is normally present, with some variation, in most promoters. The base sequences lying between the various well-characterized elements appear to be of lesser importance. The core promoter region is often referred to as a minimal promoter region because it is functional on its own to promote a basal level of transcription.

[0005] The presence of the core promoter region defines a sequence as being a promoter: if the region is absent, the promoter is non-functional. The core region acts to attract the general transcription machinery to the promoter for transcription initiation. However, the core promoter region is insufficient to provide full promoter activity. A series of regulatory sequences, often upstream of the core, constitute the remainder of the promoter. The regulatory sequences determine expression level, the spatial and temporal pattern of expression and, for a subset of promoters, expression under inductive conditions (regulation by external factors such as light, temperature, chemicals and hormones). Regulatory sequences may be short regions of DNA sequence 6-100 base pairs that define the binding sites for trans-acting factors, such as transcription factors. Regulatory sequences may also be enhancers, longer regions of DNA sequence that can act from a distance from the core promoter region, sometimes over several kilobases from the core region. Regulatory sequence activity may be influenced by trans-acting factors including general transcription machinery, transcription factors and chromatin assembly factors.

[0006] Frequently, it is desirable to have tissue-specific expression of a gene of interest in a plant. Tissue-specific promoters promote expression exclusively in one set of tissues without expression throughout the plant; tissue-preferred promoters promote expression at a higher level in a subset of tissues with significantly less expression in the other tissues of the plant. For example, one may desire to express a value-added product only in corn seed but not in the remainder of the plant. Another example is the production of male sterility by tissue-specific ablation.

[0007] Tissue specific promoters may be expressed in specific tissue at a specific time or times during the plant growth cycle. However, sufficient expression levels of gene products, especially those gene products directed to expression in specific tissues, is difficult to obtain. Iyer M., et al. (2001). It is known that the 5′ untranslated leader sequence of mRNA, introns, and the 3′ untranslated region of mRNA effect expression for particular genes. For example, Sieburth, L. E. and Meyerowitz, E. M. (1997) show that intragenic sequences appear to be necessary for the expression of the AGAMOUS (AG) gene, an Arabidopsis MADS box gene, in the distinct expression patterns of normal early and later flower development. Larkin J. C., et al. (1993) show that deletion of the 3′ noncoding region of the Arabidopsis GLABROUS1 (GL1) gene negatively affects GL1 function. However, to date, identifying and specific regulatory regions and incorporating them into a robust trait delivery platform has not been accomplished.

[0008] Important aspects of the present invention are based on the discovery that DNA sequences from the MADS gene family are exceptionally useful in the development of robust expression cassettes that express recombinant genes in the reproductive tissues of plants.

### SUMMARY OF THE INVENTION

[0009] The present invention includes a number of different aspects, including specific regulatory control of transgene expression in plants by identifying regulatory sequences from the MADS gene family and incorporating such sequences into expression cassettes for expression of recombinant gene products in the reproductive tissue of plants.

[0010] The present invention relates to a method of constructing expression cassettes by identifying the target gene, using the relevant cDNA sequence to annotate the gDNA sequence for the purpose of identifying regulatory sequences of the target gene, and incorporating one or more of the regulatory sequences into an expression cassette with a nucleic acid molecule. A plant transformed with an expression cassette of the invention expresses the product of the nucleic acid molecule in a manner that mimics the expression of the target gene.

[0011] The present invention relates to the specific regulatory control of transgene expression in plants, and includes targeting transgene expression to developing reproductive tissue in maize, rice and other monocots. Use of the expression cassettes of the present invention includes expressing a glucose or sucrose transporter to increase reproductive sink strength. Sink strength can also be increased by flower-specific expression of an invertase gene or one or more of the trehalose metabolism genes. The invention further encompasses enhancing the capacity for small molecule uptake via increased expression of specific transporters.

### DEFINITIONS

[0012] The terms “open reading frame” and “ORF” refer to the amino acid sequence encoded between translation initiation and termination codons of a coding sequence. The terms “initiation codon” and “termination codon” refer to a unit of three adjacent nucleotides (‘codon’) in a coding sequence that specifies initiation and chain termination, respectively, of protein synthesis (mRNA translation).

[0013] The term “abiotic stress” refers to nonliving environmental factors such as frost, drought, excessive heat, high winds, etc., that can have harmful effects on plants.

[0014] The term “nucleic acid” refers to a polynucleotide of high molecular weight which can be single-stranded or double-stranded, composed of monomers (nucleotides) containing a sugar, phosphate and a base which is either a purine or pyrimidine. A “nucleic acid fragment” is a fraction of a given nucleic acid molecule. In higher plants, deoxyribonucleic acid (DNA) is the genetic material while ribonucleic acid (RNA) is involved in the transfer of information contained within DNA into proteins. A “genome” is the entire body of genetic material contained in each cell of an organism. The term “nucleotide sequence” refers to a polymer of DNA or RNA which can be single- or double-stranded, optionally containing synthetic, non-natural or altered nucleotide bases capable of incorporation into DNA or RNA polymers. Unless otherwise indicated, a particular nucleic acid sequence of this invention also implicitly encompasses conservatively modified variants thereof (e.g. degenerate codon substitutions) and complementary sequences and as well as the sequence explicitly indicated. Specifically, degenerate codon substitutions may be achieved by generating sequences in which the third position of one or more selected (or all) codons is substituted with mixed-base and/or deoxyinosine residues (Batzer, et al., Nucleic Acid Res. 19:5081 (1991); Ohtsuka, et al., J. Biol. Chem. 260:2605-2608 (1985); and Rossolini, et al., Mol. Cell. Probes 8:91-98 (1994)). The term nucleic acid is used interchangeably with gene, cDNA, and mRNA encoded by a gene.

[0015] “Operably-linked” refers to the association of nucleic acid sequences on a single nucleic acid fragment so that the function of one is affected by the other. For example, a promoter is operably-linked with a coding sequence or functional RNA when it is capable of affecting the expression of that coding sequence or functional RNA (i.e., that the coding sequence or functional RNA is under the transcriptional control of the promoter). Coding sequences in sense or antisense orientation can be operably-linked to regulatory sequences.

[0016] “Promoter” refers to a nucleotide sequence, usually upstream (5′) to its coding sequence, which controls the expression of the coding sequence by providing the recognition for RNA polymerase and other factors required for proper transcription. “Promoter regulatory sequences” consist of proximal and more distal upstream elements. Promoter regulatory sequences influence the transcription, RNA processing or stability, or translation of the associated coding sequence. Regulatory sequences include enhancers, promoters, untranslated leader sequences, introns, and polyadenylation signal sequences. They include natural and synthetic sequences as well as sequences that may be a combination of synthetic and natural sequences. An “enhancer” is a DNA sequence that can stimulate promoter activity and may be an innate element of the promoter or a heterologous element inserted to enhance the level or tissue specificity of a promoter. It is capable of operating in both orientations (normal or flipped), and is capable of functioning even when moved either upstream or downstream from the promoter. The meaning of the term “promoter” includes “promoter regulatory sequences.”

[0017] “Primary transformant” and “T0 generation” refer to transgenic plants that are of the same genetic generation as the tissue that was initially transformed (i.e., not having gone through meiosis and fertilization since transformation). “Secondary transformants” and the “T1, T2, T3, etc. generations” refer to transgenic plants derived from primary transformants through one or more meiotic and fertilization cycles. They may be derived by self-fertilization of primary or secondary transformants or crosses of primary or secondary transformants with other transformed or untransformed plants.

[0018] “Gene” refers to a nucleic acid fragment that expresses mRNA, functional RNA, or specific protein, including regulatory sequences. The term “Native gene” refers to a gene as found in nature. The term “chimeric gene” refers to any gene that contains 1) DNA sequences, including regulatory and coding sequences, that are not found together in nature, or 2) sequences encoding parts of proteins not naturally adjoined, or 3) parts of promoters that are not naturally adjoined. Accordingly, a chimeric gene may comprise regulatory sequences and coding sequences that are derived from different sources, or comprise regulatory sequences and coding sequences derived from the same source, but arranged in a manner different from that found in nature. A “transgene” refers to a gene that has been introduced into the genome by transformation and is stably maintained. Transgenes may include, for example, genes that are either heterologous or homologous to the genes of a particular plant to be transformed. Additionally, transgenes may comprise native genes inserted into a non-native organism, or chimeric genes. The term “endogenous gene” refers to a native gene in its natural location in the genome of an organism. A “foreign” gene refers to a gene not normally found in the host organism but one that is introduced into the organism by gene transfer.

[0019] “Expression cassette” as used herein means a DNA sequence capable of directing expression of a particular nucleotide sequence in an appropriate host cell, comprising a promoter operably linked to the nucleotide sequence of interest which is operably linked to termination signals. It also typically comprises sequences required for proper translation of the nucleotide sequence. The coding region usually codes for a protein of interest but may also code for a functional RNA of interest, for example antisense RNA or a nontranslated RNA, in the sense or antisense direction. The expression cassette comprising the nucleotide sequence of interest may be chimeric, meaning that at least one of its components is heterologous with respect to at least one of its other components.

[0020] “Intron” refers to an intervening section of DNA which occurs almost exclusively within a eukaryotic gene, but which is not translated to amino acid sequences in the gene product. The introns are removed from the pre-mature mRNA through a process called splicing, which leaves the exons untouched, to form an mRNA. For purposes of the present invention, the definition of the term “intron” includes modifications to the nucleotide sequence of an intron derived from a target gene, provided the modified intron does not significantly reduce the activity of its associated 5′ regulatory sequence.

[0021] “Exon” refers to a section of DNA which carries the coding sequence for a protein or part of it. Exons are separated by intervening, non-coding sequences (introns). For purposes of the present invention, the definition of the term “exon” includes modifications to the nucleotide sequence of an exon derived from a target gene, provided the modified exon does not significantly reduce the activity of its associated 5′ regulatory sequence.

### BRIEF DESCRIPTION OF THE FIGURES

[0022] FIGS. 1A and 1B are schematic representations of the OsMADS5 cDNA and of the annotation of the OsMADS5 gDNA with OsMADS5 cDNA sequence.

[0023] FIG. 2A is a schematic representation of the OsMADS5 assembly vector.

[0024] FIG. 2B is a schematic representation of the OsMADS5 binary vector.

[0025] FIG. 3 includes scanned images showing the histochemical localization of OsMADS5-driven GUS activity in T1 maize 5 days before pollination in (A) the longitudinal section of the ear (B) cross sections of the ear, (C) ear node (ear removed), (D) node below ear node, (E) tassel (F) leaf and (G) silk.

[0026] FIG. 4 includes scanned images showing the histochemical localization of OsMADS5-driven GUS activity in T1 maize after pollination in the (A) longitudinal and (B) cross sections of ear tissue harvested at 1 day after pollination; and (C) longitudinal and (D) cross sections of ear tissue harvested at two days after pollination.

[0027] FIG. 5 includes scanned images showing histochemical localization of OsMADS5-driven GUS expression in T1 maize during kernel maturation in the (A) cross and (B) longitudinal sections of ear tissue harvested at 5 days after pollination; in the (C) cross and (D) longitudinal sections of ear tissue harvested at 10 days after pollination; and the (E) cross and (F) longitudinal sections of ear tissue harvested at 20 days after pollination FIGS. 6A and 6B are schematic representations of the OsMADS 6 cDNA and of the annotation of the OsMADS6 gDNA with OsMADS6 cDNA sequence.

[0028] FIG. 7A is a schematic representation of the OsMADS6 assembly vector.

[0029] FIG. 7B is a schematic representation of the OsMADS6 binary vector.

[0030] FIG. 8 includes scanned images showing the histochemical localization of OsMADS6-driven GUS expression in T1 maize vegetative tissue in the (A) silk at 2 days before pollination, and in the (B) leaf disc, (C) tassels and (D,E) longitudinal and cross section of the ear node at 8 days before pollination.

[0031] FIG. 9 includes scanned images showing the histochemical localization of OsMADS6-driven GUS expression in T1 Maize ear tissue in the (A) longitudinal and (B) cross sections of the developing ear at 8 days before pollination; and in the (C) longitudinal and (D) cross section of the developing ear at 2 days before pollination.

[0032] FIG. 10 includes scanned images showing the histochemical localization of OsMADS6-driven GUS expression in T1 maize ear tissue in the (A) cross and (B) longitudinal sections at 1 day of pollination, and in the (C) cross and (D) longitudinal sections at 3 days after pollination.

[0033] FIG. 11 include photocopies showing the histochemical localization of OsMADS6-driven GUS expression in T1 maize ear tissue during maturation in the (A) longitudinal and (B) cross sections at 5 days after pollination, in the (C) longitudinal and (D) cross sections at 14 days after pollination, and in the (E) longitudinal and (F) cross sections and (G) kernel at 25 days after pollination.

[0034] FIG. 12 is a schematic representation of the annotation of the OsMADS8 gDNA with OsMADS8 cDNA sequence

[0035] FIG. 13A is a schematic representation of the OsMADS8 assembly vector.

[0036] FIG. 13B is a schematic representation of the OsMADS8 binary vector.

[0037] FIG. 14 includes scanned images showing the histochemical localization of OsMADS8-driven GUS expression in T1 maize in the (A) tassel, (B) leaf punch, (C) silk detached from florets, (D) ear node, (E) node beneath ear node, (F) cross section and (G) longitudinal section through the developing ear from tissue taken around 5 days before pollination.

[0038] FIG. 15 includes scanned images showing the histochemical localization of OsMADS8-driven GUS expression in T1 maize in (A) the cross and (B) longitudinal sections through the developing ear, and (C) the stained florets from tissue taken 3 days before pollination, and in the (E) cross and (F) longitudinal sections through the ears taken the day of pollination, and (F) cross and (G) longitudinal sections through ears taken 1 day after pollination, and (H) cross and (I) longitudinal sections through the ear taken 6 days after pollination.

[0039] FIG. 16 includes scanned images showing the histochemical localization of OsMADS8-driven GUS expression in T1 maize in (A) cross and (B) longitudinal sections through the developing ear taken 11 days after pollination, and (C) cross and (D) longitudinal sections through the developing ear taken 14 days after pollination, and (E) cross and (F) longitudinal sections through the developing ear taken 20 days after pollination.

[0040] FIG. 17 is a schematic representation of the annotation of the OsMADS13 gDNA with OsMADS13 cDNA sequence.

[0041] FIG. 18 is a schematic representation of the OsMADS13 Assembly Vector.

[0042] FIG. 19 is a schematic representation of the OsMADS13 Binary Vector.

[0043] FIG. 20 includes scanned images showing the histochemical localization of OsMADS13-driven GUS activity in T1 maize taken 5 days before pollination in the first fully expanded leaf, the (B) silk; (C) tassel florets; (D) longitudinal section through developing ear; and (E) cross-section through developing ear.

[0044] FIG. 21 includes scanned images showing the histochemical localization of OsMADS13-driven GUS activity in T1 maize taken approximately 5 days before pollination in (A) the first fully expanded leaf; (B) silk; (C) tassel florets; and in (D) the stalk section through the node from which the ear emerged.

[0045] FIG. 22 includes scanned images showing the histochemical localization of OsMADS13-driven GUS activity in T1 maize siblings taken from the longitudinal sections of developing ears approximately 7 days before pollination of (A) Sibling # 18 and (B) sibling #5 and from (C) the cross section and (D) longitudinal section of Sib #4 at 5 days before pollination.

[0046] FIG. 23 includes scanned images showing the histochemical localization of OsMADS13-driven GUS activity in a maturing maize ear harvested 4 days after pollination (A, B), and harvested (C) 6-7 days after pollination.

[0047] FIG. 24 is a scanned images showing the histochemical localization of OsMADS13-driven GUS activity in a maturing maize OsMADS13 ear harvested 21 days after pollination.

[0048] FIG. 25 includes scanned images of T1 seed from plants transformed with (A) OsMADS5, (B) OsMADS6, (C) OsMADS8 and (D) OsMADS13. GUS expression was assessed by histochemical localization. Seeds were germinated and grown for 10 days in axenic culture. Seedlings were vacuum infiltrated with histochemical reagent and incubated at 37° C. for 24 hours, then cleared with ethanol. There is very slight staining in the aerial tissue in (A), (C) and (D). Otherwise GUS activity was not detected. No GUS activity was observed in the roots.

[0049] FIGS. 26A and 26B shows an alignment of T6PP protein sequences.

[0050] FIG. 27A shows the OsMADS6-OsT6PP-Assembly vector.

[0051] FIG. 27B shows the OsMADS6-OsT6PP-Binary vector.

[0052] FIG. 28 shows the effect of the OsMADS6-T6PP-3 transgene on yield in a drought stress study.

### DETAILED DESCRIPTION OF THE INVENTION

[0053] The present invention includes a method for constructing expression cassettes based on identifying a target gene and incorporating into the expression cassettes modified regulatory elements of the selected target gene. For example, regulatory elements from genes that are expressed in roots, stalks, leaves, or reproductive tissues that provide insect resistance, herbicide tolerance, or abiotic stress tolerance are incorporated into expression cassettes for the purpose of producing a transgenic event in a plant that closely mimics the expression profile of the original target gene. Thus, the target gene may be identified from gene expression data.

[0054] The present invention is also directed to expression cassettes that incorporate the regulatory mechanisms of target genes of interest to express in plants the products of nucleic acid molecules of interest in a manner that mimics the expression profile of the original target genes.

[0055] The present invention further includes expression cassettes that incorporate 5′-MADS gene regulatory sequences to express the products of nucleic acid molecules in plant reproductive tissues, and further includes expression cassettes incorporating both MADS 5′- and 3′-regulatory sequences.

[0056] The present invention also includes expression cassettes that incorporate 5′-MADS gene regulatory sequences, and further incorporate a 5′-MADS gene exon.

[0057] The present invention also includes expression cassettes that incorporate 5′-MADS gene regulatory sequences, and further incorporates a 5′-MADS gene exon, and a 5′-MADS gene intron.

[0058] The present invention further includes expression cassettes that incorporate 5′-MADS gene regulatory sequences, and further incorporates a 5′-MADS gene exon, a 5′-MADS gene intron, and a second exon.

[0059] The present invention also includes and further includes expression cassettes incorporating both MADS 5′- and 3′-regulatory sequences, wherein said 3′-regulatory sequence include the 3′-non-translated sequence, and the 3′-nontranscribed sequence.

[0060] For purposes of this invention, the definition of the term “3′-non-translated sequence” includes includes modifications to the nucleotide sequence of a 3′-non-translated sequence derived from a target gene, provided the modified 3′-non-translated sequence does not significantly reduce the activity of its associated 3′ regulatory sequence.

[0061] For purposes of this invention, the definition of the term “3′-nontranscribed sequence” includes modifications to the nucleotide sequence of a 3′-nontranscribed sequence derived from a target gene, provided the modified 3′-nontranscribed sequence does not significantly reduce the activity of its associated 3′ regulatory sequence. The 3′-nontranscribed sequence extends approximately 0.5 to 1.5 kb downstream of the transcription termination site.

[0062] The present invention also includes expression cassettes incorporating both MADS 5′- and 3′-regulatory sequences, wherein said 3′-regulatory sequence includes the 3′-non-translated sequence, and the 3′-nontranscribed sequence, and may further include an intron of said MADS gene.

[0063] In general MADS genes contribute to the development of plant reproductive structures (De Bodt et al., 2003). For example, the DoMADS3 gene is expressed specifically in pedicel tissue (Yu and Goh, 2000). The genes of the OsMADS gene family were selected for expression cassette development because they encode MADS-transcription factors that are expressed in young rice flowers (Kang and An, 1997). The proteins encoded by genes of the OsMADS gene family are similar to the orchid DoMADS3 gene (GenBank accession AF198176). The present invention recognizes that one method of stabilizing or increasing yield in monocots such as maize is to increase sink strength in reproductive tissue. Thus, transgenic methods for production of plants having increased sink strength in reproductive tissue would benefit from the use of promoters that result in specific expression in a plant's reproductive tissues. The present invention therefore includes the use of OsMADS gene 5′- and 3′-regulatory sequences in expression cassettes to target transgene expression to developing reproductive tissues. The MADS genes from which gene regulatory sequences were identified and utilized according to the present invention encode the following list of MADS proteins (TABLE 1). The MADS proteins are compared by percent identity and similarity to the protein encoded by the DoMADS3 gene.

TABLE 1

| | Whole Protein | | | MADS Domain Only | |
|---|---|---|---|---|---|
| MADS gene | identity | similarity | gaps | identity | similarity |
| AB003322 | 42% | 58% | 0% | 68% | 78% |
| AB003324 | 59% | 74% | 3% | 80% | 95% |
| AB003328 | 48% | 64% | 0% | 77% | 91% |
| AF077760 | 40% | 59% | 2% | 64% | 80% |
| AF095645 | 40% | 61% | 5% | 64% | 90% |
| AF139664 | 50% | 66% | 1% | 78% | 95% |
| AF139665 | 48% | 66% | 0% | 80% | 95% |
| AF141964 | 40% | 60% | 11% | 66% | 86% |
| AF141965 | 51% | 67% | 0% | 84% | 91% |
| AY174093 | 42% | 63% | 0% | 63% | 87% |
| AF204063 | 60% | 72% | 3% | 91% | 98% |
| AF345911 | 50% | 68% | 5% | 80% | 95% |
| AF424549 | 39% | 59% | 2% | 63% | 87% |
| AJ293816 | 35% | 52% | 8% | 65% | 79% |
| AY115556 | 39% | 61% | 1% | 60% | 85% |
| AY177695 | 39% | 58% | 0% | 66% | 87% |
| AY177696 | 38% | 62% | 4% | 61% | 87% |
| AY177698 | 41% | 61% | 3% | 68% | 87% |
| AY177699 | 37% | 59% | 3% | 63% | 78% |
| AY177700 | 41% | 61% | 0% | 66% | 87% |
| AY177702 | 38% | 59% | 5% | 70% | 89% |
| AY224482 | 38% | 59% | 5% | 70% | 89% |
| AY250075 | 42% | 67% | 5% | 64% | 88% |
| L37527 | 37% | 60% | 5% | 63% | 85% |
| L37528 | 45% | 68% | 1% | 84% | 94% |
| U78891 | 62% | 75% | 4% | 94% | 99% |
| U78782 | 58% | 69% | 4% | 91% | 99% |
| (OsMADS6) | | | | | |
| U78892 | 60% | 73% | 6% | 94% | 99% |
| (OsMADS8) | | | | | |
| U78890 | 57% | 72% | 2% | 92% | 97% |
| (OsMADS5) | | | | | |
| AF151693 | 46% | 67% | 1% | 84% | 94% |
| (OsMADS13) | | | | | |
| AF095646 | 55% | 67% | 6% | 94% | 99% |

[0064] The present invention therefore includes an expression cassette for expression of a nucleic acid molecule product primarily in the reproductive tissue of a plant comprising a promoter, a first exon; a first intron, and a second exon of a MADS gene, wherein said promoter, first exon, intron, and second exon are the 5′-regulatory sequence of said expression cassette; wherein said 5′-regulatory sequence is engineered to include a translational initiation codon at approximately the 3′-end of said 5′-regulatory sequence, and not to contain restriction endonuclease sites that hinder manipulation by recombinant DNA methods or additional translation initiation codons upstream of said translation initiation codon; a 3′-regulatory sequence of a MADS gene that does not to contain restriction endonuclease sites that hinder manipulation by recombinant DNA methods; and a nucleic acid molecule operably linked to said 5′-regulatory sequence and said 3′-regulatory sequence.

[0065] Recombinant DNA methods require the presence of specific restriction endonuclease sites at the termini of the DNA molecules to be joined. The most efficient practice requires the sites in one molecule complement the sites in the other molecule. For example, a plasmid with SacI and NotI restriction endonuclease sites is required to clone a gene of interest with SacI and Not I restriction endonuclease sites at its termini. Ideally, these sites are unique, that is they should not occur at any other place in either molecule. If these sites occur internally, they hinder manipulation by recombinant DNA methods and should be eliminated. Site-directed mutagenesis is one method of eliminating such sites. Techniques such as partial digestion followed by gel-purification of the appropriately sized fragment will also accomplish this without eliminating the internal restriction endonuclease sites, but are far less efficient and therefore less desirable.

[0066] The present invention recognizes that chemical synthesis, that is use of synthetic chemical technology as opposed enzyme-mediated technology, of a polynucleotide molecule can replace or substitute for recombinant DNA methods in the construction of a polynucleotide molecule comprising a specific nucleotide sequence.

[0067] The present invention further includes a method for constructing an expression cassette comprising the steps of selecting a target gene based on its expression data or its encoded protein's similarity to a protein encoded by another gene of interest; identifying the open reading frame on said target gene cDNA; identifying the positions of the translational start codon, translational stop codon, the first intron, first exon, second exon, the 3′-untranslated sequence and the 3′-nontranscribed sequence of said target gene gDNA by using the cDNA to annotate the target gene gDNA; incorporating into an expression cassette a 5′-regulatory sequence comprising said promoter, first exon, first intron, and second exon and a 3′-regulatory sequence comprising the 3′-untranslated sequence and the 3′-nontranscribed sequence; and operably linking a nucleic acid molecule to said 5′-regulatory sequence and said 3′-regulatory sequence of said expression cassette, wherein said nucleic acid molecule is expressed in a manner that mimics the expression profile of said target gene of interest.

### EXAMPLE 1

### Method of Constructing Expression Cassettes Comprising Regulatory Sequences from the MADS Gene Family

1. Identifying target MADS genes.

2. Identifying high quality sequence for both the target's genomic DNA (gDNA) and cDNA.

3. Identifying the target gene's open reading frame on the cDNA. In general this is the longest open reading frame.

[0068] 4. Using a candidate gene's cDNA sequence to annotate gDNA sequence and marking positions of the translation start codon, translation stop codon, introns, exons, the 5′-untranslated leader and the 3′-untranslated sequence. As is known in the art, marking the translation start codon and the translation stop codon identifies the 5′-regulatory sequence and the 3′-regualtory sequence of the gene. According to the present invention, the promoter, which includes the promoter regulatory sequence, is the sequence that extends approximately 1.5 to 2.5 kb upstream from the translation start codon, wherein the 3′-regulatory sequence of the present invention includes the 3′-untranslated sequence located immediately downstream of the translation stop codon and all or a part of the 3′-nontranscribed sequence, which extends 0.5 to 1.5 kb downstream of the transcription termination site. In one embodiment of the invention, the 5′-regulatory sequence includes the promoter, the first exon, the first intron and the second exon.

[0069] By way of example only, FIGS. 1A and 1B illustrates annotating the OsMADS5 gDNA with the OsMADS5 cDNA sequence. The gDNA contigs (AB026295 from GenBank and CL000624.108 (SEQ ID NO. 500) plus CL019873.131 (SEQ ID NO. 521) were aligned with OsMADS5 cDNA sequence (GenBank accession U78890). The cDNA sequence is broken into corresponding exons. The exons are labeled according to cDNA base numbers. Both sequences align precisely and the intervening sequences (introns) are flanked by GT . . . AG borders. Gaps in between exons represent introns. The AB026295 fragment is a portion of the entire bacterial artificial chromosome (BAC) sequence. The AB026295 (promoter) is an additional fragment from that BAC which defines sequence used for promoter development.

5. Designing expression cassettes that incorporate the following components from a MADS gene(s):

[0070] a. The promoter, a sequence that begins at the translation start codon and extends approximately 1.5 to 2.5 kb upstream of the translation start codon.
[0071] b. The first exon
[0072] c. The first intron
[0073] d. The 5′-most portion of the second exon
[0074] e. The terminus, including the 3′-untranslated sequence and the 3′-nontranscribed sequence, which extends 0.5 to 1.5 kb downstream of the transcription termination site. The terminus can further include an intron.

[0075] For simplicity the “5′-regulatory sequence” of the present invention includes components a-d and the “3′-regulatory sequence” of the present invention refers to component e.

[0076] 6. Amplifying the 5′-regulatory sequence from the appropriate gDNA template by high-fidelity PCR and cloning into a suitable bacterial vector.

[0077] The 5′-regulatory sequence from rice genomic DNA (gDNA) is amplified using high-fidelity PCR. A 50 μL reaction mixture contains 100 ng rice gDNA, 200 μM dNTPs (dATP, dCTP, dGTP, TTP), 1 μL 20 μM each of oligonucleotide primers designed to amplify the 5′-regulatory gDNA (Table 2), 1 μL 10× Expand High Fidelity buffer and 1 μL Expand High Fidelity polymerase (Roche Diagnostics, Cat. No. 1 759 078). The thermocycling program is 95° C. for 2 minutes followed by 40 cycles of (94° C. for 15 seconds, 68° C. for 7.5 minutes) followed by 68° C. for 10 minutes. The 5′-regulatory gDNA product is cloned with the TOPO XL PCR cloning kit (Invitrogen, Cat. No.K4750-20). pCR-XL-TOPO-5′-regulatory-gDNA is identified by digesting 5 μL pCR-XL-TOPO-5′-regulatory-gDNA miniprep DNA (prepared using the QIAprep Spin Miniprep procedure from Qiagen, Cat. No. 27106) with EcoRI (New England Biolabs) in a 20 μL reaction containing 2 μg BSA and 2 μL 10× EcoRI restriction endonuclease buffer (New England Biolabs). The reaction is incubated at 37° C. for 2 hours and the pCR-XL-TOPO-5′-regulatory-gDNA (EcoRI) products are resolved on 1% TAE agarose. The pCR-XL-TOPO-5′-regulatory-gDNA clone is sequenced using the ABI PRISM dye terminator cycle sequencing kit (Perkin Elmer).

7. Amplifying the “3′-regulatory sequence” from the appropriate gDNA template by high-fidelity PCR and clone into a suitable bacterial vector.

[0078] The 3′-regulatory sequence from rice gDNA is amplified using high-fidelity PCR. The 50 μL reaction mixture consists of 100 ng rice gDNA, 200 μM dNTPs, 1 μL 20 μM each of the oligonucleotide primers designed to amplify the 3′-regulatory gDNA (Table 2), 1 μL 10× Expand High Fidelity buffer and 1 μL Expand High Fidelity polymerase. The thermocycling program is 95° C. for 2 minutes followed by 40 cycles of (94° C. for 15 seconds, 68° C. for 7.5 minutes) followed by 68° C. for 10 minutes. The 3′-regulatory gDNA product is cloned with the TOPO XL PCR cloning kit (Invitrogen, Cat. No.K4750-20) following manufactures' instructions. The pCR-XL-TOPO-3′-regulatory-gDNA is identified by digesting 5 μL pCR-XL-TOPO-3′-regulatory-gDNA miniprep DNA with EcoRI in a 20 μL reaction containing 2 μg BSA and 2 μL 10× EcoRI restriction endonuclease buffer. The reaction is incubated at 37° C. for 2 hours and the pCR-XL-TOPO-3′-regulatory-gDNA (EcoRI) products are resolved on 1% TAE agarose. The pCR-XL-TOPO-3′-regulatory-gDNA clone is then sequenced.

8. Assembling the 5′-regulatory sequence and 3′-regulatory sequence in any bacterial plasmid.

[0079] The expression cassettes of the present invention were assembled in the vector pNOV6901, also known as the “Assembly Vector”. This vector contains the coding sequence for GUS reporter gene (which is disrupted by an intron to prevent bacterial expression) flanked at its 5′- and 3′-termini by unique restriction sites (polylinkers) to facilitate recombinant DNA procedures. Any number of other vectors may be used as is known to those persons skilled in the art.

9. Incorporating restriction sites in the expression cassettes, as necessary, to facilitate recombinant DNA procedures.

[0080] The “engineered” translation initiation codon, below, is the ATG in the NcoI restriction site (CCATGG). If there are any NcoI restriction sites in the “expression cassette 5′-regulatory sequence” they must be eliminated by mutagenesis. Likewise, restriction sites that are used to assemble the expression cassette must be eliminated by mutagenesis. Incorporation of the first intron in the “expression cassette 5′-regulatory sequence” requires the sequence be modified to avoid creating fusions between native coding sequence, which is normally translated into protein encoded by target gene, and the “gene of interest” (nucleic acid molecule) to be driven by the expression cassette. This is accomplished by any of a number of mutagenic procedures, including the procedure performed by the Stratagene QuikChange Multi Site-Directed Mutagenesis Kit (Cat. No. 200513). Modifications to the expression cassette 5′-regulatory sequence include:
[0081] a. Modifying the target gene's natural translation initiation codon so that the target gene's protein coding sequence is silent.
[0082] b. Modifying any other translation initiation codons that exist in the sequence between the “silenced” translation initiation codon and the “engineered” translation initiation codon to insure such codons are not operable.
[0083] c. Modifying any NcoI sites in the 5′-regulatory sequence.
[0084] d. Modifying restriction endonuclease sites, as necessary, to facilitate expression cassette assembly.

[0085] In this embodiment of the invention, the procedure does not eliminate nucleotides. Rather, it modifies them to preserve the length of the 5′-regulatory sequence in the expression cassette, yet still silencing the candidate gene's protein coding sequence. However, it is contemplated that one or more of the nucleotides could be eliminated to silence undesired protein expression, provided that 5′- and 3′-regulatory sequences of the cassette continue to enhance expression of the candidate gene in plant reproductive tissue. Furthermore, those skilled in the art do not consider it unreasonable to alter the sequence of nucleotides in a polynucleotide molecule comprising a regulatory sequence so long as the modified regulatory sequence retains a majority of the activity associated with the original regulatory sequence.

[0086] Table 2 lists the primers designed to accomplish this task for each 5′-regulatory sequence derived from the MADs gene family. The Stratagene QuikChange Multi Site-Directed Mutagenesis Kit uses each gene's pCR-XL-TOPO-5′-regulatory-gDNA clone as a template and the primers listed to mutagenize that clone according to the present invention. The primers must contain a 5′-phosphate to work. Furthermore, alterations may require more than one round of mutagenesis. The modified pCR-XL-TOPO-5′-regulatory clone is sequenced using the ABI PRISM dye terminator cycle sequencing kit (Perkin Elmer).

[0087] 10. Modifying, in some cases, the 3′-regulatory sequence to eliminate restriction endonuclease sites to facilitate recombinant DNA procedures. The “engineered” translation initiation codon is the ATG in the NcoI restriction site (CCATGG). If there are any NcoI restriction sites in the “expression cassette 3′-regulatory sequence” they must be eliminated by mutagenesis. Again, this is accomplished any of a number of mutagenic procedures. The present invention therefore includes:
[0088] a. Modifying any NcoI sites in the 3′-regulatory sequence.
[0089] b. Modifying restriction endonuclease sites, as necessary, to facilitate expression cassette assembly.

[0090] In this embodiment of the present invention, the procedure does not eliminate nucleotides. Rather, it modifies them to preserve the length of the 3′-regulatory sequence in the expression cassette. However, it is contemplated that one or more of the nucleotides could be eliminated to silence undesired protein expression, provided that 5′- and 3′-regulatory sequences of the cassette continue to enhance expression of the candidate gene in plant reproductive tissue. Furthermore, those skilled in the art do not consider it unreasonable to alter the sequence of nucleotides in a polynucleotide molecule comprising a regulatory sequence so long as the modified regulatory sequence retains a majority of the activity associated with the original regulatory sequence. Table 2 lists the primers designed to accomplish this task for each 3′-regulatory sequence derived from the MADS gene family. Each gene's pCR-XL-TOPO-3′-regulatory-gDNA clone is used as a template and the primers listed are used to mutagenize these clones. The modified pCR-XL-TOPO-3′-regulatory clones are sequenced.

11. Cloning the 3′-regulatory sequence into pNOV6901, using PCR with the modified pCR-XL-TOPO-3′-regulatory clone as template and the appropriate primer set disclosed in Table 2.

[0091] These primers are a 5′-oligonucleotide primer that introduces unique restriction site from the GUS 3′-terminal polylinker in pNOV6901 and 3′-oligonucleotide primer that introduces a rare cutting restriction site (either AscI, PacI, SgfI or RsrII) followed by a restriction endonuclease site unique to the 3′-terminal polylinker. In Table 2, these primers are listed as “primers to clone 3′-regulatory sequence in pNOV6901”.

[0092] High-fidelity PCR is used to amplify the 3′-regulatory sequence from the modified pCR-XL-TOPO-3′-regulatory clone. A 50 μL reaction mixture consists of 1 μL miniprep DNA, 200 μM dNTPs, 1 μL each of 20 μM oligonucleotide primers (Table 2), 5 μL 10× Cloned PFU buffer and 2.5 Units of Pfuturbo DNA polymerase (Stratagene, Cat. No. 600252). The thermocycling program was 95° C. for 30 seconds then 40 cycles of (95° C. for 10 seconds, 50° C. for 60 seconds, 72° C. for 6 minutes) then 72° C. for 10 minutes. The amplified 3′-regulatory sequence DNA fragment is recovered using the QTAquick PCR purification kit (Qiagen, Cat. No. 28106). The recovered 3′-regulatory sequence DNA fragment is precipitated with 20 μg glycogen, 0.3 M CH₂COONa (pH 5.2) and 2.5 volumes ethanol at −20° C. for more than 2 hours. The 3′-regulatory sequence DNA fragment is recovered by micro centrifugation, washed with 70% ethanol, dried under vacuum and resuspended in 14 μL ddH₂O. The 3′-regulatory sequence DNA fragment is digested in a 20 μL reaction containing 2 μg BSA, 2 μL of the appropriate 10× restriction endonuclease buffer and 2 μL of the appropriate restriction endonuclease(s). The reaction is incubated at 37° C. for more than 6 hours. The digested 3′-regulatory sequence DNA products are resolved on 1.0% TAE agarose and the appropriate 3′-regulatory sequence (digested) band is excised. The 3′-regulatory sequence (digested) DNA is extracted and recovered using the QIAquick Gel extraction kit (Qiagen, Cat. No. 28704). The recovered 3′-regulatory sequence (digested) DNA is ethanol precipitated with glycogen carrier. The 3′-regulatory sequence (digested) DNA fragment is recovered by micro centrifugation, washed with 70% ethanol, dried under vacuum and resuspended in 5 μL ddH₂O.

[0093] 2 μg of pNOV6901 miniprep DNA is digested in a 20 μL reaction mixture containing 2 μg BSA, 2 μL of the appropriate 10× restriction endonuclease buffer (used to generate the 3′-gene regulatory sequence,) and 2 μL of the appropriate restriction endonuclease (used to generate the 3′-gene regulatory sequence). The reaction mixture is incubated at 37° C. for more than 6 hours, then at 70° C. for 20 minutes. Then 1 μL of the appropriate 10× restriction endonuclease buffer, 1 μL 1 Unit/μL calf-intestinal alkaline phosphatase (CIP-New England Biolabs) and 8 μL ddH₂O is added to the reaction mixture and incubated at 37° C. for 30 minutes. The pNOV6901 (digested/CIP) DNA is resolved on 1.0% TAE agarose and the 4.7 kb pNOV6901 (digested/CIP) band is excised. The pNOV6901 (digested/CIP) DNA is extracted and recovered using the QIAquick Gel extraction kit (Qiagen, Cat. No. 28704). The recovered pNOV6901 (digested/CIP) DNA is ethanol precipitated with glycogen carrier. The pNOV6901 (digested/CIP) DNA is recovered by micro centrifugation, washed with 70% ethanol, and dried under vacuum and resuspend in 5 μL ddH₂O.

[0094] 4.0 μL 3′-regulatory sequence (digested) is ligated to 4.0 μL pNOV6901 (digested/CIP) in a 10 μL ligation mixture containing 1 μL 10× T4 DNA ligase buffer and 1 μL T4 DNA ligase (400 Units/μL-New England Biolabs). The ligation mixture is incubated for more than 8 hours at 16° C. 5.0 μL of ligation mixture is transformed into 50 μL Top10 competent cells (Invitrogen, Cat. No. C4040-03). The pNOV6901-3′-regulatory-sequence recombinants are verified by digesting 2 μL pNOV6901-3′-regulatory-sequence miniprep DNA with 1 μL of the appropriate restriction endonuclease in 10 μL reactions containing 1 μg BSA and 1 μL of the appropriate 10× restriction endonuclease buffer. Digests are incubated at 37° C. for 2 hours then resolved on 1% TAE agarose. The positive pNOV6901-3′-regulatory-sequence recombinants are sequenced.

12. Cloning the 5′-regulatory sequence into pNOV6901-3′-regulatory-sequence, using PCR with the modified pCR-XL-TOPO-5′-regulatory clone as template and the appropriate primer set disclosed in Table 2.

[0095] These primers are a 5′-oligonucleotide primer that introduces the same rare cutting restriction site used for the 3′-regulatory sequence preceded by a unique restriction endonuclease site in the 5′-terminal polylinker of pNOV6901 and a 3′-oligonucleotide primer that introduces an NcoI site preceded by a Kozak sequence (CCACCATGG) at the “engineered” translation initiation codon. Table 2 lists these primers as “primers to clone 5′-regulatory sequence in pNOV6901”.

[0096] High-fidelity PCR is used to amplify the 5′-regulatory sequence from the modified pCR-XL-TOPO-5′-regulatory clone. A 50 μL reaction mixture consists of 1 μL miniprep DNA, 200 μM dNTPs, 1 μL each of 20 μM oligonucleotide primers (Table 2), 5 μL 10× Cloned PFU buffer and 2.5 Units of Pfuturbo DNA polymerase (Stratagene, Cat. No. 600252). The thermocycling program was 95° C. for 30 seconds then 40 cycles of (95° C. for 10 seconds, 50° C. for 60 seconds, 72° C. for 6 minutes) then 72° C. for 10 minutes. The amplified 5′-regulatory sequence DNA fragment is recovered using the QIAquick PCR purification kit. The recovered 5′-regulatory sequence DNA fragment is ethanol precipitated with glycogen carrier. The 5′-regulatory sequence DNA fragment is recovered by micro centrifugation, washed with 70% ethanol, dried under vacuum and resuspended in 14 μL ddH₂O. The 5′-regulatory sequence DNA fragment is digested in a 20 μL reaction containing 2 μg BSA, 2 μL of the appropriate 10× restriction endonuclease buffer and 2 μL of the appropriate restriction endonuclease(s). The reaction is incubated at 37° C. for more than 6 hours. The digested 5′-regulatory sequence DNA products are resolved on 1.0% TAE agarose and the appropriate 5′-regulatory sequence (digested) band is excised. The 5′-regulatory sequence (digested) DNA is extracted and recovered using the QIAquick Gel extraction kit (Qiagen, Cat. No. 28704). The recovered 5′-regulatory sequence (digested) DNA is ethanol precipitated with glycogen carrier. The 5′-regulatory sequence (digested) DNA fragment is recovered by micro centrifugation, washed with 70% ethanol, dried under vacuum and resuspended in 5 μL ddH₂O.

[0097] 2 μg of the pNOV6901-3′-regulatory-sequence miniprep DNA is digested in a 20 μL reaction containing 2 μg BSA, 2 μL of the appropriate 10× restriction endonuclease buffer and 2 μL of the appropriate restriction endonuclease. The reaction is incubated at 37° C. for more than 6 hours, then at 70° C. for 20 minutes. Then 1 μL of the appropriate 10× restriction endonuclease buffer, 1 μL 1 Unit/μL CIP and 8 μL ddH₂O are added to the reaction and it is further incubated at 37° C. for 30 minutes. The pNOV6901-3′-regulatory-sequence (digested/CIP) DNA is resolved on 1.0% TAE agarose and the pNOV6901-3′-regulatory-sequence (digested/CIP) band is excised. The pNOV6901-3′-regulatory-sequence (digested/CIP) DNA is extracted and recovered. The recovered pNQV6901-3′-regulatory-sequence (digested/CIP) DNA is ethanol precipitated with glycogen carrier. The pNOV6901-3′-regulatory-sequence (digested/CIP) DNA is recovered by micro centrifugation, washed with 70% ethanol, dried under vacuum and resuspended in 5 μL ddH₂O.

[0098] 4.0 μL of the 5′-regulatory sequence (digested) is ligated to 4.0 μL pNOV6901-3′-regulatory-sequence (digested/CIP) in a 10 μL ligation mixture containing 1 μL 10× T4 DNA ligase buffer and 1 μL T4 DNA ligase (400 Units/μL). The ligation mixture is incubated for more than 8 hours at 16° C. 5.0 μL of ligation mixture is transformed into 50 μL Top10 competent cells. The pNOV6901-3′/5′-regulatory-sequence recombinants are verified by digesting 2 μL pNOV6901-3′/5′-regulatory-sequence miniprep DNA with 1 μL of the appropriate restriction endonuclease in 10 μL reaction mixtures containing 1 μg BSA and 1 μL of the appropriate 10× restriction endonuclease buffer. Digests are incubated at 37° C. for 2 hours then pNOV6901-3′/5′-regulatory-sequence (digested) DNA is resolved on 1% TAE agarose. The positive pNOV6901-3′/5′-regulatory-sequence recombinants are sequenced.

[0099] The expression cassette of the present invention includes a GUS reporter construct in the Assembly Vector. It is flanked by the engineered, rare-cutting restriction site. In this embodiment of the present invention the GUS reporter gene can be replaced with any gene of interest using methods known to those individuals skilled in the art.

13. The expression cassette can now be mobilized into the agrobacterium binary vector pNOV6900, by digesting the assembly vector with the rare-cutting enzyme and purifying the cassette DNA.

[0100] 2 μg pNOV6900 is digested in a 20 μL reaction mixture containing 2 μg BSA, 2 μL of the appropriate 10× restriction endonuclease buffer and 2 μL of the appropriate restriction endonuclease. The reaction mixture is incubated at 37° C. for more than 6 hours, then at 70° C. for 20 minutes. Then 1 μL of the appropriate 10× restriction endonuclease buffer, 1 μL 1 Unit/μL CIP and 8 μL ddH₂O are added to the reaction and it is further incubated at 37° C. for 30 minutes. 2 μg of the pNOV6901-3′/5′-regulatory-sequence miniprep DNA is digested in a 20 μL reaction containing 2 μg BSA, 2 μL of the same 10× restriction endonuclease buffer used for pNOV6900 and 2 μL of the same restriction endonuclease used for pNOV6900. The reaction is incubated at 37° C. for more than 6 hours.

[0101] The digested plasmid DNA, pNOV6900 (digested/CIP) and pNOV6901-3′/5′-regulatory-sequence (digested) are resolved on 1.0% TAE agarose and the 9.2 kb pNOV6900 (digested/CIP) and the appropriate pNOV6901-3′/5′-regulatory-sequence (digested) bands are excised. The pNOV6900 (digested/CIP) and the pNOV6901-3′/5′-regulatory-sequence (digested) DNAs are extracted and recovered. The recovered pNOV6900 (digested/CIP) and the pNOV6901-3′/5′-regulatory-sequence (digested) DNAs are ethanol precipitated with glycogen. The pNOV6900 (digested/CIP) and the pNOV6901-3′/5′-regulatory-sequence (digested) DNA fragments are recovered by micro centrifugation, washed with 70% ethanol, dried under vacuum and resuspended each in 5 μL ddH₂O.

[0102] 4.0 μL of the pNOV6900 (digested/CIP) is ligated to 4.0 μL pNOV6901-3′/5′-regulatory-sequence (digested) in a 10 μL ligation mixture containing 1 μL 10× T4 DNA ligase buffer and 1 μL T4 DNA ligase (400 U/μL). The ligation mixture is incubated for more than 8 hours at 16° C. 5.0 μL of ligation mixture is transformed into 50 μL Top10 competent cells. The pNOV6900-pNOV6901-3′/5′-regulatory-sequence recombinants are verified by digesting 7.5 μL pNOV6900-pNOV6901-3′/5′-regulatory-sequence miniprep DNA with 1.0 μL NcoI in 10 μL reaction mixtures containing 1 μg BSA and 1 μL 10× restriction endonuclease buffer 4 (New England Biolabs). Digests are incubated at 37° C. for 2 hours then resolved on 1% TAE agarose. The junction sequence of positive pNOV6900-pNOV6901-3′/5′-regulatory-sequence recombinants is verified.

[0103] 14. The expression cassette can now be transformed into agrobacterium and then transformed into plants in accordance with methods known to those persons skilled in the art.

TABLE 2

Primers for constructing expression cassettes comprising regulatory
sequences from the MADS gene family

| | | |
|---|---|---|
| target | | |
| gene | name | sequence |

primers to clone 5′-regulatory sequence

| | | |
|---|---|---|
| AB003322 | AB003322-1~~~(SEQ. ID No. 133) | 5′-CGTTGCCCAGCGAGGAGCATGCGTAAAATC-3′ |
| | AB003322-2~~~(SEQ. ID No. 134) | 5′-GATTTCATTCATACTGTCCAACAGAAGGCA-3′ |
| AB003324 | AB003324-1~~~(SEQ. ID No. 145) | 5′-TCTAAATAGGGCCCAACATACTCA-3′ |
| | AB003324-2~~~(SEQ. ID No. 146) | 5′-TCAAGCGTCTTAAGCATGCTGAAATATGA-3′ |
| AB003328 | AB003328-1~~~(SEQ. ID No. 158) | 5′-AACAAAACCAATAATCTCCAATGCCC-3′ |
| | AB003328-2~~~(SEQ. ID No. 158) | 5′-CATCTTCGATCGCCGATGAACCAACC-3′ |
| AB077760 | AB077760-1~~~(SEQ. ID No. 167) | 5′-ATTCGTTGGGGGTGACATGACTAGTC-3′ |
| | AB077760-2~~~(SEQ. ID No. 168) | 5′-CAAAGATCCCCTTGATGCTGCAGCAG-3′ |
| AB095645 | AB095645-1~~~(SEQ. ID No. 179) | 5′-CTCGTCGCCGTCGTTGGCTCGGCGT-3′ |
| | AB095645-2~~~(SEQ. ID No. 180) | 5′-CAAGATTCTTGATAGCCTTATACATG-3′ |
| AF139664 | AF139664-1~~~(SEQ. ID No. 193) | 5′-TGCATCCTTACAAAGAGACAGATAGATC-3′ |
| | AF139664-2~~~(SEQ. ID No. 194) | 5′-CAAGGATTTTGTCCATACTGTGAAAAATG-3′ |
| AF139665 | AF139665-1~~~(SEQ. ID No. 207) | 5′-ACCTGGGGTTTGGAAATGGGGAGCG-3′ |
| | AF139665-2~~~(SEQ. ID No. 208) | 5′-CAAGGATCCCTTCCATACTACAGAAGAAG-3′ |
| AF141964 | AF141964-1~~~(SEQ. ID No. 218) | 5′-AAAACACTGATTAAAGGGTTGTTGAAAGGAAAACACC-3′ |
| | AF141964-2~~~(SEQ. ID No. 219) | 5′-CATAGGTACCTTCAATGCTGAAAAAGAAAACAAGGCA-3′ |
| AF141965 | AF141965-1~~~(SEQ. ID No. 232) | 5′-TGTTTCTCGATTAGGCTACAAGTTAAC-3′ |
| | AF141965-2~~~(SEQ. ID No. 233) | 5′-GATGGTTTTCTGTAGGCTGCAGAACAG-3′ |
| AF174093 | AF174093-1~~~(SEQ. ID No. 246) | 5′-AAAATTCACAAGTATAATTCGTCAC-3′ |
| | AF174093-2~~~(SEQ. ID No. 247) | 5′-CAGCTCCATCAAGCTTAACAAAGCA-3′ |
| AF204063 | AF204063-1~~~(SEQ. ID No. 258) | 5′-ACAAATTTGTTGTACCACCTACCTAGGGGT-3′ |
| | AF204063-2~~~(SEQ. ID No. 259) | 5′-CAAGGTTTTGTACATGCTGGAAGTGAA-3′ |
| AF345911 | AF345911-1~~~(SEQ. ID No. 271) | 5′-GAAAATCTCAAGGTTTCGAAAACGAC-3′ |
| | AF345911-2~~~(SEQ. ID No. 272) | 5′-CAAGGATTTTGTCCATCCTGCAGGGAAAAC-3′ |
| AF424549 | AF424549-1~~~(SEQ. ID No. 283) | 5′-TACAAAGTGCTGGAAGTGATAGTATGT-3′ |
| | AF424549-2~~~(SEQ. ID No. 284) | 5′-GATCCCCTTGATGCTGCAGCAGGATGCA-3′ |
| J293816 | AJ293816-1~~~(SEQ. ID No. 295) | 5′-CAAACATTTTAAACTTTAACCATTAATAG-3′ |
| | AJ293816-2~~~(SEQ. ID No. 296) | 5′-CAATAATCTGTTCCATGCTTCATCAATG-3′ |
| Y115556 | AY115556-1~~~(SEQ. ID No. 305) | 5′-GATATAAAAACCTACTTTATGTTCATG-3′ |
| | AY115556-2~~~(SEQ. ID No. 306) | 5′-CAGCTCCTCCATGGTTCTGTTCAAAGAAATC-3′ |
| Y177695 | AY177695-1~~~(SEQ. ID No. 316) | 5′-TCAGTCCATCATTTCGTCTACAACTAA-3′ |
| | AY177695-2~~~(SEQ. ID No. 317) | 5′-TATTATTGATTTCATGCTAACAAAAAG-3′ |
| Y177696 | AY177696-1~~~(SEQ. ID No. 330) | 5′-CAAGCAAAGAAACAAATTTCGCAATTAG-3′ |
| | AY177696-2~~~(SEQ. ID No. 331) | 5′-ATAACTGACTTCATGCTGCATATTTGCA-3′ |
| Y177698 | AY177698-1~~~(SEQ. ID No. 342) | 5′-AAGATTTGAACTACTGCCTTGTCTTC-3′ |
| | AY177698-2~~~(SEQ. ID No. 343) | 5′-CAAAGATATTTGCAATCCTGCCAAAAG-3′ |
| Y177699 | AY177699-1~~~(SEQ. ID No. 356) | 5′-TCCGGTCGGCCCTCGTCCTCCCCGT-3′ |
| | AY177699-2~~~(SEQ. ID No. 357) | 5′-CAAACTCCCTCACGCTGCGCCAAGAAAG-3′ |
| AY177700 | AY177700-1~~~(SEQ. ID No. 366) | 5′-ATAAGTATTTCAGAAAGCTGAAGTTGA-3′ |
| | AY177700-2~~~(SEQ. ID No. 367) | 5′-CAAGTTATGCATATTTCTTGCATTTTG-3′ |
| Y177702 | AY177702-1~~~(SEQ. ID No. 379) | 5′-TCTTTTCGCAAACTAAACAAGGCCT-3′ |
| | AY177702-2~~~(SEQ. ID No. 380) | 5′-CACAGTTTTCATGCTAGCATGCAAGTAAAG-3′ |
| Y224482 | AY224482-1~~~(SEQ. ID No. 392) | 5′-TCTTTTCGCAAACTAAACAAGGCCTTAACA-3′ |
| | AY224482-2~~~(SEQ. ID No. 393) | 5′-TATCACAGTTTTCATGCTAGCATGCAAGT-3′ |
| Y250075 | AY250075-1~~~(SEQ. ID No. 405) | 5′-GAAATGGTTTCATTTTGGGACAAGTTATTG-3′ |
| | AY250075-2~~~(SEQ. ID No. 406) | 5′-CAAGGATTCGCTCCATACTATCAATAAAATATG-3′ |
| L37527 | L37527-1~~~~~(SEQ. ID No. 419) | 5′-GCCAAGAGAGCCCCCTTGCTGCTGGT-3′ |
| | L37527-2~~~~~(SEQ. ID No. 420) | 5′-CAAGATCCTTGACAGCCTAAAACGCCA-3′ |
| L37528 | L37528-1~~~~~(SEQ. ID No. 432) | 5′-ACCACCTCAATCTCCACTGTTTGATTG-3′ |
| | L37528-2~~~~~(SEQ. ID No. 433) | 5′-CAGCTCAGATCGGTCTGGACACAAAC-3′ |
| U78891 | U78891-1~~~~~(SEQ. ID No. 443) | 5′-TCTTCTTCTTGCCTTCATTTGAGTTAATTACA-3′ |
| | U78891-2~~~~~(SEQ. ID No. 444) | 5′-CAAGCGTTTTAGTCATGCTACAAAGTTC-3′ |
| | AF095646-1~~~(SEQ ID No. 508) | 5′-TGTTGCATGCATGCGTACTGGTGATGGCCGCA-3′ |
| | AF095646-2~~~(SEQ ID No. 509) | 5′-AATGTCTTGTTTATTCTGCAAACAAAAATAGG-3′ |

| | |
|---|---|
| name | sequence |

primers to clone 3′-regulatory sequence

| | |
|---|---|
| AB003322-3~~~(SEQ. ID No. 135) | 5′-TAACTGAAAGGAAAAAAAAAGCATCCTTGC-3′ |
| AB003322-4~~~(SEQ. ID No. 136) | 5′-GAATAAATCTGGCAACTGAAATCCAACCAT-3′ |
| AB003324-3~~~(SEQ. ID No. 147) | 5′-CTAGCTAGCTAGCTACCGTTTCAGCTTC-3′ |
| AB003324-4~~~(SEQ. ID No. 148) | 5′-TGGAGATCGACCACAATTAAATTCGT-3′ |
| AB003328-3~~~(SEQ. ID No. 160) | 5′-TAAGTAACAGGCCAGGAATAAGCTGG-3′ |
| AB003328-4~~~(SEQ. ID No. 161) | 5′-ATTGCCGGGCTATAGCCTTTCTCCCT-3′ |
| AB077760-3~~~(SEQ. ID No. 169) | 5′-TGATATATCATCGCCGCCGCCGCCG-3′ |
| AB077760-4~~~(SEQ. ID No. 170) | 5′-CCGTGGTACTGAAATCGAAAAAAGAAATG-3′ |
| AB095645-3~~~(SEQ. ID No. 181) | 5′-TAAGCTGCTAGGTTGCCCCGCCACT-3′ |
| AB095645-4~~~(SEQ. ID No. 182) | 5′-GCACGGCTACCTCTCGCCGGAGTACG-3′ |
| AF139664-3~~~(SEQ. ID No. 195) | 5′-TAAGGAGGCTTCAGATCCATACCAG-3′ |
| AF139664-4~~~(SEQ. ID No. 196) | 5′-GGATAAACATTGTGAAGCAACATTTC-3′ |
| AF139665-3~~~(SEQ. ID No. 209) | 5′-TGAAGGCATCTGTTGATCTCAAACGTC-3′ |
| AF139665-4~~~(SEQ. ID No. 210) | 5′-ATGAACTCCACCTCGGGAACTCAGCCT-3′ |
| AF141964-3~~~(SEQ. ID No. 220) | 5′-TGAGCAGGAAGCACAGGTGTCCTGT-3′ |
| AF141964-4~~~(SEQ. ID No. 221) | 5′-ATGAGATACAATCTAGTACAACGAAT-3′ |
| AF141965-3~~~(SEQ. ID No. 234) | 5′-TGAAGAAGGCCAGCCACAGCAACAGCTG-3′ |
| AF141965-4~~~(SEQ. ID No. 235) | 5′-CCTTATCGAATATTCAAATCTCGATG-3′ |
| AF174093-3~~~(SEQ. ID No. 248) | 5′-TGACTTCCTGGAAGCAGTAGGAAC-3′ |
| AF174093-4~~~(SEQ. ID No. 249) | 5′-CCCCTTCTCCTCCTCCGGGAAGAAG-3′ |
| AF204063-3~~~(SEQ. ID No. 260) | 5′-TGATGTGTGTGTTCAGTTCAGGCTT-3′ |
| AF204063-4~~~(SEQ. ID No. 261) | 5′-CTGCATATACTTGCAACATTGCAATTTTA-3′ |
| AF345911-3~~~(SEQ. ID No. 273) | 5′-TAAGATGATCATCGTCGTCGTCGTCG-3′ |
| AF345911-4~~~(SEQ. ID No. 274) | 5′-TTGACTTAAATGGCAAGATAAATTAGATATAG-3′ |
| AF424549-3~~~(SEQ. ID No. 285) | 5′-TGAGATATCATCGCCGCCGCCGCCGCCG-3′ |
| AF424549-4~~~(SEQ. ID No. 286) | 5′-TTTTATTATCTTGGCGAGGCCCAAGCACCTTTG-3′ |
| AJ293816-3~~~(SEQ. ID No. 297) | 5′-TGATGGCTGGAAACTAAAACTGAGAGGA-3′ |
| AJ293816-4~~~(SEQ. ID No. 298) | 5′-TTTGAAACATTTCGGCCCTGGCTCTCCT-3′ |
| AY115556-3~~~(SEQ. ID No. 307) | 5′-TAACACTAATAATGGCCTGGGGGATAC-3′ |
| AY115556-4~~~(SEQ. ID No. 308) | 5′-AACTTTTGCACGAATGATTAAATTGCAT-3′ |
| AY177695-3~~~(SEQ. ID No. 318) | 5′-TAACACATGATCAAGTGTTAAAAACAG-3′ |
| AY177695-4~~~(SEQ. ID No. 319) | 5′-GGCTCGGTCAAACCAGCGTGGTGAGCT-3′ |
| AY177696-3~~~(SEQ. ID No. 332) | 5′-TGACCAGAAAAACATTGTTTTGCTAC-3′ |
| AY177696-4~~~(SEQ. ID No. 333) | 5′-TTTGGGATTGGACTGCATCCCAGGAA-3′ |
| AY177698-3~~~(SEQ. ID No. 344) | 5′-TGATTGCCCTCTTTCCATCCCAATAGG-3′ |
| AY177698-4~~~(SEQ. ID No. 345) | 5′-GTTAACCTAAAAGAAATATTGTTCAG-3′ |
| AY177699-3~~~(SEQ. ID No. 358) | 5′-TAGAAACAGATGGACGCTTGACGTTTCA-3′ |
| AY177699-4~~~(SEQ. ID No. 359) | 5′-AGGCTTGGTGCAAGGATACGAAATCTTG-3′ |
| AY177700-3~~~(SEQ. ID No. 368) | 5′-TAGCCGTCAAAGGACCTTGGTCAATTC-3′ |
| AY177700-4~~~(SEQ. ID No. 369) | 5′-TAATTTTACTAGTACTTTTACTTTGAC-3′ |
| AY177702-3~~~(SEQ. ID No. 381) | 5′-TAAGACTATGCCGTACAAGCTGGACGA-3′ |
| AY177702-4~~~(SEQ. ID No. 382) | 5′-CCGTGGTTGTCACAGAAGACCAATCTATAC-3′ |
| AY224482-3~~~(SEQ. ID No. 394) | 5′-TAAGACTATGCCGTACAAGCTGGACGA-3′ |
| AY224482-4~~~(SEQ. ID No. 395) | 5′-CCGTGGTTGTCACAGAAGACCAATCTATAC-3′ |
| AY250075-3~~~(SEQ. ID No. 407) | 5′-TAGAAGATGTTCAGATGAAATGGTCCCT-3′ |
| AY250075-4~~~(SEQ. ID No. 408) | 5′-AAAAAAATCACCGGCGTCAAATATTTAGGGA-3′ |
| L37527-3~~~~~(SEQ. ID No. 421) | 5′-TAGGCTGCTGAGCACTGCCAATTTG-3′ |
| L37527-4~~~~~(SEQ. ID No. 422) | 5′-TGCTGGTGCTCGAGGTGCTGAGCGCG-3′ |
| L37528-3~~~~~(SEQ. ID No. 434) | 5′-TAGTTTTGGTGTAGACACCGTACGTAC-3′ |
| L37528-4~~~~~(SEQ. ID No. 435) | 5′-TGAAAGCTACATTTTAGCCTTGTATTTG-3′ |
| U78891-3~~~~~(SEQ. ID No. 445) | 5′-TGAACAGTGCGTGCATGAACACCTACATG-3′ |
| U78891-4~~~~~(SEQ. ID No. 446) | 5′-GATGTTTTTTTTTGTCTTTTGATGCAAGGCC-3′ |
| AF095646-3~~~(SEQ. ID No. 510) | 5′-TGAAGTCCAAGCTTGCTAATAAAAACGCTG-3′ |
| AF095646-4~~~(SEQ. ID No. 511) | 5′-AAGGGTAGGGCTGCACGAAATGC-3′ |

primers to mutagenize 5′-regulatory sequence

| | |
|---|---|
| AB003322-5~~~(SEQ. ID No. 137) | 5′-CGCGCGGCGGCGATCGCGCGGGAGAGGCGG-3′ |
| AB003322-6~~~(SEQ. ID No. 138) | 5′-CTTCTGTTGGACAGTATCAATGAAATC-3′ |
| AB003322-7~~~(SEQ. ID No. 139) | 5′-ATTTCATCCATGCTACAATTTATTTT-3′ |
| AB003322-8~~~(SEQ. ID No. 140) | 5′-AGAAGGCCGAGGAGGTCTCCGTGCTC-3′ |
| AB003324-5~~~(SEQ. ID No. 149) | 5′-TCGAGCGGGAGATCGAGATCGGGCGAGGCA-3′ |
| AB003324-6~~~(SEQ. ID No. 150) | 5′-AATTCATATTTCAGCATCCTTAAGAC-3′ |
| AB003324-7~~~(SEQ. ID No. 151) | 5′-ACTGTGCAGATGAGGTCATGCGCTCAT-3′ |
| AB003324-8~~~(SEQ. ID No. 152) | 5′-AGGCCTACGAGCTGTCCATCCTCTGCGA-3′ |
| AB003324-9~~~(SEQ. ID No. 153) | 5′-ACGCGTCCGGCCATCGCTGCCTAGCTAG-3′ |
| AB077760-5~~~(SEQ. ID No. 171) | 5′-GCTGCAGGGGGCGGCCATCGGGAGGGGCAAGATCGA-3′ |
| AB077760-6~~~(SEQ. ID No. 172) | 5′-CGCACGGGGATCATCAAGAAGGCCAG-3′ |
| AB077760-7~~~(SEQ. ID No. 173) | 5′-TCGCCATCATCATCTTCTCCTCGAC-3′ |
| AB077760-8~~~(SEQ. ID No. 174) | 5′-ATGAAGAAGGCCAGGGTGCTCACCGTGCTCT-3′ |
| AB095645-5~~~(SEQ. ID No. 183) | 5′-AGGAGGCGGGATCGGGCGCGGGAAG-3′ |
| AB095645-6~~~(SEQ. ID No. 184) | 5′-GAAACGTGGGCCATCGCCATTGAGCGAAA-3′ |
| AB095645-7~~~(SEQ. ID No. 185) | 5′-TTCCTCTTCCTCCCATCGCGAACTCCT-3′ |
| AB095645-8~~~(SEQ. ID No. 186) | 5′-TGCCGTTTCTGGAGCTGCCCTACTGA-3′ |
| AF139664-5~~~(SEQ. ID No. 197) | 5′-AGAACAGGAGGAAGAAGGGGCGGGGCAA-3′ |
| AF139664-6~~~(SEQ. ID No. 198) | 5′-TACGCCACCGACTCAAGGTACGTACGTAC-3′ |
| AF139664-7~~~(SEQ. ID No. 199) | 5′-TCATTTTTCACAGTATCGACAAAATCCT-3′ |
| AF139664-8~~~(SEQ. ID No. 200) | 5′-TGGGCAGGAAAAGGCATGGCCCACCCCCA-3′ |
| AF139664-9~~~(SEQ. ID No. 201) | 5′-TGCTTTGATTAATACAGCTCGCAGCGAC-3′ |
| AF139665-5~~~(SEQ. ID No. 211) | 5′-CCGCCGACGACGATCGGGAGAGGGCCGGT-3′ |
| AF139665-6~~~(SEQ. ID No. 212) | 5′-TCTTCTGTAGTATCGAAGGGATCCTTG-3′ |
| AF139665-7~~~(SEQ. ID No. 213) | 5′-TCGCCGCGCGCGCGCGATGGGCGAGCT-3′ |
| AF141964-5~~~(SEQ. ID No. 222) | 5′-GGGTTTTTCGGGGCGGGGAAGGCGCGGAGGGGGA-3′ |
| AF141964-6~~~(SEQ. ID No. 223) | 5′-TGAAGTTGTCCATGCTTACTAATACTCAAA-3′ |
| AF141964-7~~~(SEQ. ID No. 224) | 5′-ATTGGTTTTCCCATGCGTGTGATGGATATTC-3′ |
| AF141964-8~~~(SEQ. ID No. 225) | 5′-GACCAAAACCAGCCCATGCTGCATGGTACACTATTAGGCT-3′ |
| AF141964-9~~~(SEQ. ID No. 226) | 5′-CCTAATAAGAAACCGATGGGTATAAAATGGAGA-3′ |
| AF141965-5~~~(SEQ. ID No. 236) | 5′-GAGAGATCGGGATCGATCGTGCGGGGGA-3′ |
| AF141965-6~~~(SEQ. ID No. 237) | 5′-TCCAAGCGCCGGAAAGGCCTCCTCAAGAA-3′ |
| AF141965-7~~~(SEQ. ID No. 238) | 5′-GAAAATGGAGGATGCAGAATATATATCCT-3′ |
| AF141965-8~~~(SEQ. ID No. 239) | 5′-AACAACTGTTCCAAGGAGCATGTCCAC-3′ |
| AF141965-9~~~(SEQ. ID No. 240) | 5′-CTTCTCGCGCGCCCGCGATTTCCGTT-3′ |
| AF141965-10~~(SEQ. ID No. 241) | 5′-TCTCCCCCCGCGGCGGCCTCTACGA-3′ |
| AF174093-5~~~(SEQ. ID No. 250) | 5′-GGCGAGGTCGCGTTGGGGCAAGGGAA-3′ |
| AF174093-6~~~(SEQ. ID No. 251) | 5′-GAAGATCGAGATCAAGAGGATCGAGGAC-3′ |
| AF174093-7~~~(SEQ. ID No. 252) | 5′-CGTGCTGTGCGAAGCGCAGGTCGGC-3′ |
| AF174093-8~~~(SEQ. ID No. 253) | 5′-AAGAAGGCGAACCAGCTCGCCGTGC-3′ |
| AF204063-5~~~(SEQ. ID No. 262) | 5′-AGGAGGAGGAAGAAGATCGGGAGGGGGAA-3′ |
| AF204063-6~~~(SEQ. ID No. 263) | 5′-TCTCCAGCTCATCTTGGTACGTATAGCA-3′ |
| AF204063-7~~~(SEQ. ID No. 264) | 5′-TTCACTTCCAGCATCTACAAAACCTTG-3′ |
| AF204063-8~~~(SEQ. ID No. 265) | 5′-ATCTTCTCCGGCCGCCGCCGCCTCTT-3′ |
| AF204063-9~~~(SEQ. ID No. 266) | 5′-GTCCAGCTAGCCAAGGATGGATATATTA-3′ |
| AF345911-5~~~(SEQ. ID No. 275) | 5′-AGCGGCGAGGATCGGGCGGGGGAAGGT-3′ |
| AF345911-6~~~(SEQ. ID No. 276) | 5′-GTTTTCCCTGCAGGATCGACAAAATCCT-3′ |
| AF345911-7~~~(SEQ. ID No. 277) | 5′-CGGCCGCTTCCATCGATTTCAGCTGCT-3′ |
| AF424549-5~~~(SEQ. ID No. 287) | 5′-AGGGGGCGGCGATGGGGAGGGGCAAGAT-3′ |
| AF424549-6~~~(SEQ. ID No. 287) | 5′-CCGGACGGGGATCATCAAGAAGGCCAG-3′ |
| AF424549-7~~~(SEQ. ID No. 289) | 5′-AGGTCGCCATCATCAAGTTCTCCTCCA-3′ |
| AF424549-8~~~(SEQ. ID No. 290) | 5′-TTGCATCTATCCATCGTTAAAACAAGTC-3′ |
| AJ293816-5~~~(SEQ. ID No. 299) | 5′-TGTGTGATCTGATAAGGCTGGCGGCGGCGGT-3′ |
| AJ293816-6~~~(SEQ. ID No. 300) | 5′-TACATTGATGAAGCATCGAACAGATTATTG-3′ |
| AY115556-5~~~(SEQ. ID No. 309) | 5′-CTTATCTTGATCGATCGCGCGAGGCAAG-3′ |
| AY115556-6~~~(SEQ. ID No. 310) | 5′-TGAACAGAACCATCGAGGAGCTG-3′ |
| AY115556-7~~~(SEQ. ID No. 311) | 5′-AGCTCTGATATAGCATGGAGGTAATTG-3′ |
| AY177695-5~~~(SEQ. ID No. 320) | 5′-TCGATCGATTGAAGAAGGGGAGAGGGA-3′ |
| AY177695-6~~~(SEQ. ID No. 321) | 5′-GACAACACGAAGAACCGGCAGGTGAC-3′ |
| AY177695-7~~~(SEQ. ID No. 322) | 5′-CGCGGCGGGCTGATCAAGAAGGCCCGGGAG-3′ |
| AY177695-8~~~(SEQ. ID No. 323) | 5′-CTTTTTGTTAGCATCAAATCAATAATA-3′ |
| AY177695-9~~~(SEQ. ID No. 324) | 5′-TGAAGAGCAAACCATCGAGCTAACAAACACA-3′ |
| AY177695-10~~(SEQ. ID No. 325) | 5′-TCAGGGATGACAACACGATGGCACCATCAGTCAT-3′ |
| AY177696-5~~~(SEQ. ID No. 334) | 5′-TAGCGGCGAAGAAGATCGGGAGGGGGAAGA-3′ |
| AY177696-6~~~(SEQ. ID No. 335) | 5′-GAGGTCGGCCTCAAGATCTTCTCCAG-3′ |
| AY177696-7~~~(SEQ. ID No. 336) | 5′-CAAATATGCAGCATCAAGTCAGTTAT-3′ |
| AY177696-8~~~(SEQ. ID No. 337) | 5′-CAGCATGGGCCATCGCCAGCTCTTCTCT-3′ |
| AY177698-5~~~(SEQ. ID No. 346) | 5′-ACCAACCTGATCAAAGGGGCGTGGGA-3′ |
| AY177698-6~~~(SEQ. ID No. 347) | 5′-TCCAAGAGGAGGATCGGGCTGCTCAAGAAA-3′ |
| AY177698-7~~~(SEQ. ID No. 348) | 5′-AGGCACTGGCAAGAAGTACGAGTACT-3′ |
| AY177699-5~~~(SEQ. ID No. 360) | 5′-ATCGGCCAGAATCGGGAGGGGGCGCA-3′ |
| AY177700-5~~~(SEQ. ID No. 370) | 5′-AAGAGTGAAACAACAAGGTCAGAGGA-3′ |
| AY177700-6~~~(SEQ. ID No. 371) | 5′-GAAAGGTGCAAATCCGACGAATAGAG-3′ |
| AY177700-7~~~(SEQ. ID No. 372) | 5′-ATTAGCTACTAAAGGGTGTGTTTCCA-3′ |
| AY177700-8~~~(SEQ. ID No. 373) | 5′-AAAATGCAAGAAATTTGCATAACTTG-3′ |
| AY177702-5~~~(SEQ. ID No. 382) | 5′-GAGAGCGAGGAGATCGGGAGGGGGAAGA-3′ |
| AY177702-6~~~(SEQ. ID No. 384) | 5′-TTACTTGCATGCTAGCTTGAAAACTGT-3′ |
| AY177702-7~~~(SEQ. ID No. 385) | 5′-ATCCTAAATTTTCATCGATGGCATCTAG-3′ |
| AY177702-8~~~(SEQ. ID No. 386) | 5′-GATCAGGACCATGCCAGTCTGATGGCCAA-3′ |
| AY177702-9~~~(SEQ. ID No. 387) | 5′-GCACAAGGAAAGCCTTGGAACATCTT-3′ |
| AY224482-5~~~(SEQ. ID No. 396) | 5′-GAGAGCGAGGAGATCGGGAGGGGGAAGA-3′ |
| AY224482-6~~~(SEQ. ID No. 397) | 5′-CTTGCATGCTAGCTTGAAAACTGTGA-3′ |
| AY224482-7~~~(SEQ. ID No. 398) | 5′-CTAAATTTTCATGCATGGCATCTAG-3′ |
| AY224482-8~~~(SEQ. ID No. 399) | 5′-TGATCAGGACCATCGCAGTCTGATGG-3′ |
| AY224482-9~~~(SEQ. ID No. 400) | 5′-CAAGGAAAGCCAAGGAACATCTTTAC-3′ |
| AY250075-5~~~(SEQ. ID No. 409) | 5′-AGAGAGAGAGATGAAGGGGAGGGGGAA-3′ |
| AY250075-6~~~(SEQ. ID No. 410) | 5′-TATTGATAGTATCGAGCGAATCCTTG-3′ |
| AY250075-7~~~(SEQ. ID No. 411) | 5′-CAGTTGGTTGCCAAGGCGCGTTGCCGA-3′ |
| AY250075-8~~~(SEQ. ID No. 412) | 5′-GAGCCTCGGCCATGCCCAGCTCCTTCCT-3′ |
| AY250075-9~~~(SEQ. ID No. 413) | 5′-CTATTATTTTAAGAAAGCATGGATTATATAG-3′ |
| AY250075-10~~(SEQ. ID No. 414) | 5′-TGAGACAGACCCATGCCTGGGCCTAC-3′ |
| L37527-5~~~~~(SEQ. ID No. 423) | 5′-GAGGAGTTGGATATCGGGCGCGGCAAGAT-3′ |
| L37527-6~~~~~(SEQ. ID No. 424) | 5′-ACCTCCATTCCTTGCATGGCGGCCT-3′ |
| L37527-7~~~~~(SEQ. ID No. 425) | 5′-TACTCCACTCCAACGATGGCGTCCAGT-3′ |
| L37528-5~~~~~(SEQ. ID No. 436) | 5′-AGCATACCCATCCATCTTGAACATGATGGT-3′ |
| L37528-6~~~~~(SEQ. ID No. 437) | 5′-CATCCATCTTGAACATCTTGGTAAATTCTGGCT-3′ |
| U78891-5~~~~~(SEQ. ID No. 447) | 5′-AGATCGATCGGGATCGGGAGGGGTCGGGT-3′ |
| U78891-6~~~~~(SEQ. ID No. 448) | 5′-GAACTTTGTAGCATCACTAAAACGCT-3′ |
| U78891-7~~~~~(SEQ. ID No. 449) | 5′-GTCCATGAAACAAACCGATGGTAATTGC-3′ |
| AF095646-5~~~(SEQ ID No. 512) | 5′-CAAAAGTTGAGGGATTGGATCGATCAGA-3′ |
| AF095646-6~~~(SEQ ID No. 513) | 5′-GATTGGATCGATCAGAGATCGGGAGGGGAAGGGT-3′ |
| AF095646-7~~~(SEQ ID No. 514) | 5′-GTTTTGTTTCCTTCGATGGGATGCGTATTC-3′ |
| AF0956461-8~~(SEQ ID No. 515) | 5′-GAAGGCGTACGAGGTCTCCGTGCTCTG-3′ |

primers to mutagenize 3′-regulatory sequence

| | |
|---|---|
| AB003328-5~~~(SEQ. ID No. 162) | 5′-CGTATTGTCGTCCATGCATGCGAAATGCTA-3′ |
| AB095645-9~~~(SEQ. ID No. 187) | 5′-GTAAAATTGCAGATCGATGGATGTCTCCA-3′ |
| AB095645-10~~(SEQ. ID No. 188) | 5′-GAACCTCTCCATGCCGTGCACCCCG-3′ |
| AF139664-10~~(SEQ. ID No. 202) | 5′-ACCTGACCCGGTCCCGTCGCCTGCTGCT-3′ |
| AF141964-10~~(SEQ. ID No. 227) | 5′-AGAGAAAAGAGTTGCCTTGGCCTCTGGCTCTGC-3′ |
| AF345911-8~~~(SEQ. ID No. 278) | 5′-AGAACTATTCCAAGGTAATTGTACCATC-3′ |
| AY177698-8~~~(SEQ. ID No. 349) | 5′-AGGAGGCCAACCTGCATGGCTACGTTCTT-3′ |
| AY177698-9~~~(SEQ. ID No. 340) | 5′-GCTCGTTTGATCCAAGGACAAGATCA-3′ |
| AY 177698-10~(SEQ. ID No.351) | 5′-TTCCTAAGGACACGATGGAGTCTGGA-3′ |
| AY177699-6~~~(SEQ. ID No. 361) | 5′-AGTCGCCCCCGGCCTTTTAAGAGCCGCA-3′ |
| AY177700-9~~~(SEQ. ID No. 374) | 5′-TAGGATTCATAACGATGGACATGTTC-3′ |
| L37527-8~~~~~(SEQ. ID No. 426) | 5′-ACGGCAGCGGCCCGTCCGGCAGCTCCGGGA-3′ |
| L37527-9~~~~~(SEQ. ID No. 427) | 5′-GAACCTCTCCATCGCGCCGCCCCGGGGGCT-3′ |
| L37528-7~~~~~(SEQ. ID No. 438) | 5′-ATGTGAGGACCATCGATTGATGCATTG-3′ |
| U78891-8~~~~~(SEQ. ID No. 450) | 5′-ACCTACATGCCCGCATGGCTACCATGAT-3′ |
| U78891-9~~~~~(SEQ. ID No. 451) | 5′-TCGTCGTTTTCTCGATGGCCTTGCAT-3′ |
| AF095646-9~~~(SEQ ID No. 516) | 5′-CCCTTCCTTACCCATGCTGGTAACAAATATG-3′ |

primers to clone 3′-regulatory sequence in pNOV6901

| | |
|---|---|
| AB003322-9~~~(SEQ. ID No. 141) | 5′-TAATAAGAGCTCTGAAAGGAAAAAAAAAGCA-3′ |
| AB003322-10~~(SEQ. ID No. 142) | 5′-ATATATGCGGCCGCGGTCCGAATAAATCTGGCAACTGA-3′ |
| AB003324-10~~(SEQ. ID No. 154) | 5′-ATATATGCGGCCGCGGTCCGTGGAGATCGACCACAATTAAATTC-3′ |
| AB003324-11~~(SEQ. ID No. 155) | 5′-TAGGTAGAGCTCCTAGCTAGCTAGCTACCGTTTCA-3′ |
| AB003328-6~~~(SEQ. ID No. 163) | 5′-TAATAAGAGCTCGTAACAGGCCAGGAATAAGCT-3′ |
| AB003328-7~~~(SEQ. ID No. 164) | 5′-ATATATGCGGCCGCGGTCCGATTGCCGGGCTATAGCCTT-3′ |
| AB077760-11~~(SEQ. ID No. 175) | 5′-ATGCATGAGCTCTATATCATCGCCGC-3′ |
| AB077760-12~~(SEQ. ID No. 176) | 5′-ATATATGCGGCCGCGGTCCGTGGTACTGAAATC-3′ |
| AB095645-13~~(SEQ. ID No. 189) | 5′-TAATAAGAGCTCGCTGCTAGGTTGCCCCGCCACT-3′ |
| AB095645-14~~(SEQ. ID No. 190) | 5′-TAATAAGCGGCCGCGGTCCGCACGGCTACCTCTCGCCGGA-3′ |
| AF139664-11~~(SEQ. ID No. 203) | 5′-TAATAAGAGCTCGGAGGCTTCAGATCCATACCA-3′ |
| AF139664-12~~(SEQ. ID No. 204) | 5′-ATATATGCGGCCGCGGTCCGGATAAACATTGTGAAGCAAC-3′ |
| AF139665-8~~~(SEQ. ID No. 214) | 5′-TGATGAGCGGCCGCAGGCATCTGTTGATCTCA-3′ |
| AF139665-9~~~(SEQ ID No. 215) | 5′-TATATAACTAGTGCGGTCCGATGAACTCCACCTCGGGAAC-3′ |
| AF141964-11~~(SEQ. ID No. 228) | 5′-TGATGAGCGGCCGCAGGAAGCACAGGTGT-3′ |
| AF141964-12~~(SEQ. ID No. 229) | 5′-ATATATCCCGGGCGGTCCGATGAGATACAATCTAGTAC-3′ |
| AF141965-11~~(SEQ. ID No. 242) | 5′-TGATGAGCGGCCGCAGAAGGCCAGCCACA-3′ |
| AF141965-12~~(SEQ. ID No. 243) | 5′-TATATACCCGGGCGGTCCGCCTTATCGAATATTCA-3′ |
| AF174093-10~~(SEQ. ID No. 254) | 5′-TGATGAGAGCTCCTTCCTGGAAGCAGTAG-3′ |
| AF174093-11~~(SEQ. ID No. 255) | 5′-ATATATGCGGCCGCGGTCCGCCCCTTCTCCTCCTCCGGGA-3′ |
| AF204063-10~~(SEQ. ID No. 267) | 5′-TATATACCCGGGCGGTCCGCTGCATATACTTGCAACA-3′ |
| AF204063-11~~(SEQ. ID No. 268) | 5′-TGATGAGCGGCCGCTGTGTGTGTTCAGTTCAG-3′ |
| AF345911-9~~~(SEQ. ID No. 279) | 5′-TAATAAGCGGCCGCGATGATCATCGTCGTCGT-3′ |
| AF345911-10~~(SEQ. ID No.280) | 5′-TATATACCCGGGCGGTCCGTTGACTTAAATGGCAAG-3′ |
| AF424549-9~~~(SEQ. ID No. 291) | 5′-TGATGAGCGGCCGCGATATCATCGCCGCCG-3′ |
| AF424549-10~~(SEQ. ID No. 292) | 5′-TATATACCCGGGCGGTCCGTTTTATTATCTTGGCGA-3′ |
| A1293816-7~~~(SEQ. ID No. 301) | 5′-TGATGAGCGGCCGCTGGCTGGAAACTAAAACT-3′ |
| AJ293816-8~~~(SEQ. ID No. 302) | 5′-TATATACCCGGGCGGTCCGTTTGAAACATTTCGGCCCT-3′ |
| AY115556-8~~~(SEQ. ID No. 312) | 5′-TAATAAGCGGCCGCACTAATAATGGCCTGG-3′ |
| AY115556-9~~~(SEQ. ID No. 313) | 5′-TATATACCCGGGCGGTCCGAACTTTGCACGAATG-3′ |
| AY177695-11~~(SEQ. ID No. 325) | 5′-TAATAAGAGCTCCACATGATCAAGTGTTAAAAAC-3′ |
| AY177695-12~~(SEQ. ID No. 326) | 5′-TATATAGCGGCCGCGGTCCGGCTCGGTCAAACCAGCGT-3′ |
| AY177696-9~~~(SEQ. ID No. 338) | 5′-TGATGAGAGCTCCCAGAAAAACATTGTTTTG-3′ |
| AY177696-10~~(SEQ. ID No. 339) | 5′-TATATAGCGGCCGCGGTCCGTTTGGGATTGGAC-3′ |
| AY177698-11~~(SEQ. ID No. 325) | 5′-TGATGAGCGGCCGCTTGCCCTCTTTCCATC-3′ |
| AY177698-12~~(SEQ. ID No. 353) | 5′-TATATACCCGGGCGGTCCGTTAACCTAAAAGAAAT-3′ |
| AY177699-7~~~(SEQ. ID No. 362) | 5′-TAGTAGGCGGCCGCAAACAGATGGACGCTTGA-3′ |
| AY177699-8~~~(SEQ. ID No. 363) | 5′-TATATACCCGGGCGGTCCGAGGCTTGGTGCAAG-3′ |
| AY177700-10~~(SEQ. ID No. 375) | 5′-TAGTAGGCGGCCGCGTCAAAGGACCT-3′ |
| AY177700-11~~(SEQ. ID No. 376) | 5′-TATATACCCGGGCGGTCCGTAATTTTACTAGTACT-3′ |
| AY177702-10~~(SEQ. ID No. 388) | 5′-TAATAAGAGCTCGACTATGCCGTACAAGC-3′ |
| AY177702-11~~(SEQ. ID No. 389) | 5′-ATATATGCGGCCGCGGTCCGTGGTTGTCACAG-3′ |
| AY224482-10~~(SEQ. ID No. 401) | 5′-TAATAAGAGCTCGACTATGCCGTACAAGC-3′ |
| AY224482-11~~(SEQ. ID No. 402) | 5′-TATATAGCGGCCGCGGTCCGTGGTTGTCACAGA-3′ |
| AY250075-11~~(SEQ. ID No. 415) | 5′-TAGTAGAGCTCAAGATGTTCAGATGAAATG-3′ |
| AY250075-12~~(SEQ. ID No. 416) | 5′-TATATAGCGGCCGCGGTCCGAAAAAAATCACCGGCGT-3′ |
| L37527-10~~~~(SEQ. ID No. 428) | 5′-TAGTAGAGCTCGCTGCTGAGCACTGCCA-3′ |
| L37527-11~~~~(SEQ. ID No. 429) | 5′-TATATAGCGGCCGCGGTCCGTGCTGGTGCTCGAGGT-3′ |
| L37528-8~~~~~(SEQ. ID No. 439) | 5′-TAGTAGAGCTCTTTTGGTGTAGACACC-3′ |
| L37528-9~~~~~(SEQ. ID No. 440) | 5′-ATATAGCGGCCGCGGTCCGTGAAAGCTACATTTTAGC-3′ |
| U78891-10~~~~(SEQ. ID No. 452) | 5′-TGATGAGCTCACAGTGCGTGCATGAACA-3′ |
| U78891-11~~~~(SEQ. ID No. 453) | 5′-TATATAGCGGCCGCGGTCCGATGTTTTTTTTTGTCTTTTGATGC-3′ |
| AF095646-10~~(SEQ ID No. 517) | 5′-ATATATCTCGAGCGGACCGTGTTGCATGCATGCGTACTGGTGA-3′ |
| AF095646-11~~(SEQ ID No.518) | 5′-ATATATCCATGGTGGGTTTATTCTGCAAACAAAAATAG-3′ |

primers to clone 5′-regulatory sequence in pNOV6901

| | |
|---|---|
| AB003322-10~~(SEQ. ID No. 142) | 5′-TATATACCATGGTGGTGATACTGTCCAACAGAAGG-3′ |
| AB003322-11~~(SEQ. ID No. 143) | 5′-ATATATGGATCCGGACCGTTGCCCAGCGAGGAGCATG-3′ |
| AB003324-12~~(SEQ. ID No. 156) | 5′-ATATATGGATCCGGACCGTCTAAATAGGGCCCAACATAC-3′ |
| AB003324-13~~(SEQ. ID No. 157) | 5′-TATATACCATGGTGGCTTAAGGATGCTGAAATATGA-3′ |
| AB003328-8~~~(SEQ. ID No. 165) | 5′-TATATAGGATCCGGACCGAACAAAACCAATAATCTCCAATG-3′ |
| AB003328-9~~~(SEQ. ID No. 166) | 5′-TATATACCATGGTGGATCGCCGATGAACCAACCAAC-3′ |
| AB077760-9~~~(SEQ. ID No. 177) | 5′-ATATATGTCGACGGACCGATTCGTTGGGGGTGACATGAC-3′ |
| AB077760-10~~(SEQ. ID No. 178) | 5′-TACAGTACCATGGTGGCCCTTGATGCTGCAGCAGGAT-3′ |
| AB095645-11~~(SEQ. ID No. 191) | 5′-GAGAGACCTGCAGGCGGACCGCTCGTCGCCGTCGTTGGCTCGGCGT-3′ |
| AB095645-12~~(SEQ. ID No. 192) | 5′-ATATATCCATGGTGGTTGATAGCCTTATACATGTCCC-3′ |
| AF139664-13~~(SEQ. ID No. 205) | 5′-ATATATGGATCCGGACCGTGCATCCTTACAAAGAGACA-3′ |
| AF139664-14~~(SEQ. ID No. 206) | 5′-TATATACCATGGTGGTTGTCCATACTGTGAAAAATG-3′ |
| AF139665-10~~(SEQ. ID No. 216) | 5′-ATATATGTCGACGGACCGACCTGGGGTTTGGAAATG-3′ |
| AF139665-11~~(SEQ. ID No. 217) | 5′-TATATACCATGGTGGCCTTCCATACTACAGAAG-3′ |
| AF141964-13~~(SEQ. ID No. 230) | 5′-ATATATCCTGCAGGCGGACCGAAAACACTGATTAAAGGGT-3′ |
| AF141964-14~~(SEQ. ID No. 231) | 5′-ATATATCCATGGTGGGCTTCAATGCTGAAAAAGAAAAC-3′ |
| AF141965-13~~(SEQ. ID No. 244) | 5′-ATATATGGATCCGGACCGTGTTTCTCGATTAGGCTAC-3′ |
| AF141965-14~~(SEQ. ID No. 245) | 5′-ATATATCCATGGTGGTCTGTAGGCTGCAGAACAGACAC-3′ |
| AF174093-12~~(SEQ. ID No. 256) | 5′-TATATCCTGCAGGCGGACCGAAAATTCACAAGTATAATTC-3′ |
| AF174093-13~~(SEQ. ID No. 257) | 5′-TATATACCATGGTGGTCAAGCTTAACAAAGCAT-3′ |
| AF204063-12~~(SEQ. ID No. 269) | 5′-TATATAGGATCCGGACCGACAAATTTGTTGTACCAC-3′ |
| AF204063-13~~(SEQ. ID No. 270) | 5′-ATATATCCATGGTGGTGTACATGCTGGAAGTGA-3′ |
| AF345911-11~~(SEQ. ID No. 281) | 5′-TATATAGTCGACGGACCGAAAATCTCAAGGTTTC-3′ |
| AF345911-12~~(SEQ. ID No. 282) | 5′-TATATACCATGGTGGTTGTCGATCCTGCAGGGAA-3′ |
| AF424549-11~~(SEQ. ID No. 293) | 5′-TATATAGTCGACGGACCGTACAAAGTGCTGGAAGT-3′ |
| AF424549-12~~(SEQ. ID No. 294) | 5′-TATATAGCATGGTGGTGATGCTGCAGCAGGATGCA-3′ |
| AJ293816-9~~~(SEQ. ID No. 303) | 5′-TATATAGTCGACGGACCGCAAACATTTTAAACTTTAAC-3′ |
| AJ293816-10~~(SEQ. ID No. 304) | 5′-TATATACCATGGTGGTGTTCGATGCTTCATCAATGT-3′ |
| AY115556-10~~(SEQ. ID No. 314) | 5′-TATATACCTGCAGGCGGACCGATATAAAAACCTACTTTATG-3′ |
| AY115556-11~~(SEQ. ID No. 315) | 5′-ATATATCCATGGTGGCGATGGTTCTGTTCAAAGAAATC-3′ |
| AY177695-13~~(SEQ. ID No. 328) | 5′-TATATAGGATCCGGACCGTCAGTCCATCATTTCGTC-3′ |
| AY177695-14~~(SEQ. ID No. 329) | 5′-TATATACCATGGTGGATTTGATGCTAACAAAAAGG-3′ |
| AY177696-11~~(SEQ. ID No. 340) | 5′-TATATAGGATCCGGACCGCAAGCAAAGAAACAAATTTCG-3′ |
| AY177696-12~~(SEQ. ID No. 341) | 5′-ATATACCATGGTGGCTTGATGCTGCATATTTG-3′ |
| AY177698-13~~(SEQ. ID No. 354) | 5′-TATATAGGATCCGGACCGAAGATTTGAACTACTGCCT-3′ |
| AY177698-14~~(SEQ. ID No. 355) | 5′-TATATACCATGGTGGTTTGCAATCCTGCCA-3′ |
| AY177699-9~~~(SEQ. ID No. 364) | 5′-TATATAGGATCCGGACCGTCCGGTCGGCCCTCGTCCT-3′ |
| AY177699-10~~(SEQ. ID No. 365) | 5′-TATATACCATGGTGGCTCACGCTGCGCCA-3′ |
| AY177700-12~~(SEQ. ID No. 377) | 5′-TATATAGGATCCGGACCGATAAGTATTTCAGAAAG-3′ |
| AY177700-13~~(SEQ. ID No. 378) | 5′-TATATACCATGGTGGGCAAATTTCTTGCATTTTG-3′ |
| AY177702-12~~(SEQ. ID No. 390) | 5′-TATATAGTCGACGGACCGTCTTTTCGCAAACTAAAC-3′ |
| AY177702-13~~(SEQ. ID No. 391) | 5′-TATATACCATGGTGGTCAAGCTAGCATGCAAG-3′ |
| AY224482-12~~(SEQ. ID No. 403) | 5′-TATATAGTCGACGGACCGTCTTTTCGCAAACTAAACAAGG-3′ |
| AY224482-13~~(SEQ. ID No. 404) | 5′-TATATACCATGGTGGTTTTCAAGCTAGC-3′ |
| AY250075-13~~(SEQ. ID No. 417) | 5′-TATATACCTGCAGGCGGACCGAAATGGTTTCATTTTGG-3′ |
| AY250075-14~~(SEQ. ID No. 418) | 5′-TATATACCATGGTGGCGCTCGATACTATCA-3′ |
| L37527-12~~~~(SEQ. ID No. 430) | 5′-TATATACCTGCAGGCGGACCGCCAAGAGAGCCCCCT-3′ |
| L37527-13~~~~(SEQ. ID No. 431) | 5′-TATATACCATGGTGGTTGACAGCCTAAAACG-3′ |
| L37528-10~~~~(SEQ. ID No. 441) | 5′-TATATAGGATCCGGACCGACCACCTCAATCTCCACT-3′ |
| L37528-11~~~~(SEQ. ID No. 442) | 5′-TATATACCATGGTGGATCGGTCTGGACA-3′ |
| U78891-12~~~~(SEQ. ID No. 454) | 5′-TATATAGGATCCGGACCGTCTTCTTCTTGCCTTCATTTG-3′ |
| U78891-13~~~~(SEQ. ID No. 455) | 5′-TATATACCATGGTGGTTAGTGATGCTACAAAGTTC-3′ |
| AF095646-12~~(SEQ ID No. 519) | 5′-TATATAGAGCTCAGTCCAAGCTTGCTAATAAAAACGCT-3′ |
| AF095646-13~~(SEQ ID No. 520) | 5′-TATATACCCGGGCGGTCCGAAGGGTAGGGCTGCACGAA-3′ |

### EXAMPLE 2

1. Construction of the Assembly Vector pNOV6901 Containing the β-glucuronidase (GUS) Coding Sequence.

[0104] A. Preparation of GUS Coding Sequence.

[0105] The β-glucuronidase (GUS) coding sequence Narasimhulu, et al 1996, Plant Cell, 8: 873-886, which includes an engineered intron, was amplified from pNOV5003 in a Pfuturbo polymerase (Stratagene, Cat. No. 600250) reaction. The reaction mixture consisted of 1 μL pNOV5003 miniprep DNA 200 μM dNTPs, 20 μM GUS5 oligonucleotide primer 5′-atggtacgtcctgtagaaacc-3′ (SEQ ID NO 498), 20 μM GUS3 oligonucleotide primer 5′-gatcgagctctcattgtttgcctccctg-3′ (SEQ ID NO 499), 5 μL 10× cloned Pfu buffer and 2.5 Units of Pfuturbo DNA polymerase (Stratagene, Cat. No. 600250) in a final volume of 50 μL. The thermocycling program was at 95° C. for 30 seconds then 10 cycles of (95° C. for 5 seconds, 55° C. for 10 seconds, 72° C. for 2.5 minutes) then 20 cycles of (95° C. for 5 seconds, 57° C. for 15 seconds, 72° C. for 2.5 minutes) then 72° C. for 2.5 minutes. The 2.2 kb GUS PCR product was isolated and concentrated using the QIAEX II kit (Qiagen, Cat. No. 20021). The GUS PCR product was recovered in 15 μL ddH₂O and subsequently digested in a 20 μL reaction containing 1 μg BSA, 2 μL 10× restriction endonuclease buffer and 1 μL SacI. The reaction was incubated at 37° C. for 2 hours. The GUS PCR product (SacI) was resolved on 1.5% TBE agarose and the 2.2 kb GUS PCR product (SacI) band was excised. The GUS PCR product (SacI) DNA was recovered from the agarose in 15 μL ddH₂O with the QIAEX II kit (Qiagen, Cat. No. 20021).

[0106] B. Preparation of the pSP73 Vector.

[0107] An E. coli vector pSP73 (Promega, Cat. No. P2221) miniprep DNA was prepared. 1 μL of the miniprep DNA was digested in a 20 μL reaction mixture containing 1 μg BSA, 2 μL 10× restriction endonuclease, 1 μL SmaI and 1 μL SacI. The reaction was incubated at 25° C. for 1.5 hours then 37° C. for 1.5 hours. The pSP73 (SmaI/SacI) DNA was resolved on 1.5% TBE agarose and the 2.4 kb pSP73 (SmaI/SacI) band was excised. The pSP73 (SmaI/SacI) DNA was recovered from the agarose in 15 μL ddH₂O with the QIAEX II kit (Qiagen, Cat No. 20021).

[0108] C. Construction of pSP73-GUS

[0109] 5 μL of pSP73 (SmaI/SacI) was ligated to 5 μL GUS PCR product (SacI) by mixing with an equal volume of Takara DNA Ligation Mix, Version II (Cat. No. TAK 6022) and incubating at 16° C. for 30 minutes. 7.5 μL of the ligation mixture was transformed into 50 μL XL-1 supercompetent cells (Stratagene, Cat. No. 200236). pSP73-GUS recombinants were verified by digesting 2 μL pSP73-GUS miniprep DNA in a 20 μL reaction containing 2 μg BSA, 2 μL 10× restriction endonuclease buffer, 1 μL XbaI and 1 μL SacI and the pSP73-GUS (XbaI/SacI) products were resolved on 1.5% TBE agarose. The positive pSP73-GUS recombinants were sequenced.

[0110] D. Addition of Restriction Endonuclease Sites to pSP73-GUS

[0111] The pSP73-GUS construct lacks flexibility to clone 3′-regulatory sequence just after the GUS coding sequence. Additional restriction sites were added to the polylinker to increase flexibility at the 3′-terminus of the GUS coding sequence by ligating a synthetic adapter to the construct. The adapter (Synthetic Adaptor I) was made by combining 40 μL of 50 μM oligonucleotide PL-F 5′-Pccgcgggcggccgcactagtcccgggcccat-3′ (SEQ ID NO. 456), 40 μL of 50 μM oligonucleotide PL-R 5′-Pcgatgggcccgggactagtgcggccgcccgcggagct-3′ (SEQ ID NO. 457)—where P is a 5′-phosphate group—in a 100 μL mixture that is 25 mM in Tris-HCl (pH 8.0) and 10 mM in MgCl₂. The mixture was boiled for 5 minutes, removed from heat and naturally cooled to room temperature (about 60 minutes), yielding a 20 μM Synthetic Adaptor I solution.

[0112] The pSP73-GUS construct was prepared by digesting 14 μL of miniprep pSP73-GUS DNA with 1 μL SacI and 1 μL ClaI in a 20 μL reaction mixture containing 2 μg BSA and 2 μL 10× restriction endonuclease buffer. The reaction mixture was incubated at 37° C. for 6 hours, then at 70° C. for 20 minutes. Then 1 μL of the appropriate 10× restriction endonuclease buffer, 1 μL 1 Unit/μL CIP and 8 μL ddH₂O were added to the reaction and it was further incubated at 37° C. for 30 minutes. The pSP73-GUS (SacI/ClaI/CIP) DNA was resolved on 1% TAE agarose, excised, recovered and ethanol precipitated with glycogen carrier. The pSP73-GUS (SacI/ClaI/CIP) DNA was recovered by micro centrifugation, washed with 70% ethanol, dried under vacuum and resuspended in 5 μL ddH₂O.

[0113] 4.5 μL of Synthetic Adaptor I solution was ligated to 2.5 μL pSP73-GUS (SacI/ClaI/CIP) in a 10 μL ligation mixture containing 1 μL 10× T4 DNA ligase buffer and 1 μL T4 DNA ligase and incubated more than 8 hours at 16° C. 4 μL of the ligation mixture was transformed into 50 μL XL-1 supercompetent cells (Stratagene, Cat. No. 200236). The pSP73-GUS-mod recombinants were verified by digesting 5 μL pSP73-GUS-mod miniprep DNA in a 20 μL reaction containing 2 μg BSA, 2 μL 10× restriction endonuclease buffer and 1 μL NotI. The digests were resolved on 1.0% TAE agarose, and the sequence of positive pSP73-GUS-mod recombinants was verified. The finished clone was designated pNOV6901.

2. Construction of pNOV6900

[0114] It was necessary to construct an Agrobacterium binary vector to facilitate mobilization of expression cassettes constructed in pNOV6901 into plants. The pNOV2115 vector was modified by inserting an adaptor that introduces the PacI, SgFI and RsrII restriction endonuclease recognition sites. pNOV2115 miniprep DNA (14 μL) was digested with 1 μL KpnI and 1 μL HindIII in a 20 μL reaction mixture containing 2 μg BSA and 2 μL 10× restriction endonuclease buffer. Digests were incubated at 37° C. for more than 6 hours, then at 70° C. for 20 minutes. Then 1 μL of the appropriate 10× restriction endonuclease buffer, 1 μL 1 Unit/μL CIP and 8 μL ddH₂O were added to the reaction and it was further incubated at 37° C. for 30 minutes. pNOV2115 (KpnI/HindIII/CIP) was resolved on 1% TAE agarose, the 9.2 kb pNOV2115 (KpnI/HindIII/CIP) DNA band was excised, recovered and ethanol precipitated with glycogen carrier. The pNOV2115 (KpnI/HindIII/CIP) DNA was recovered by micro centrifugation, washed with 70% ethanol, dried under vacuum and resuspended in 5 μL ddH₂O.

[0115] Additional restriction sites were added to pNOV2115 (KpnI/HindIII/CIP) by ligating the vector to Synthetic Adapter II. The Synthetic Adapter II was made by combining 37 μL of 150 μM oligonucleotide PL1 5′-Pgtaccggaccgcgatcgcttaatta-3′ (SEQ ID NO 458), 37 μL of 150 μM PL2 oligonucleotide 5′-Pagcttaattaagcgatcgcggtccg-3′ (SEQ ID NO 459)—where P is a 5′-phosphate group—in a 100 μL mixture that is 25 mM in Tris-HCl (pH 8.0) and 10 mM in MgCl₂. The mixture was boiled for 5 minutes, removed from heat and naturally cooled to room temperature (about 60 minutes), yielding a 55 μM Synthetic Adapter II solution.

[0116] 2.5 μL pNOV2115 (KpnI/HindIII/CIP) was ligated to 2.5 μL 55 μM Synthetic Adapter II solution by mixing with an equal volume of Takara DNA Ligation Mix, Version II (Cat. No. TAK 6022), and was incubated at 16° C. for 30 minutes. 5.0 μL of ligation mixture was transformed into 50 μL DH5α competent cells (Invitrogen, Cat. No. 18258-012). pNOV2115-mod recombinants were verified by digesting 2 μL pNOV2115-mod miniprep DNA with KpnI, HindIII, Pacd or RsrII in 10 μL reactions containing 1 μg BSA and 1 μL 10× restriction endonuclease buffer. The sequence of positive pNOV2115-mod recombinants was verified. The finished clone was designated pNOV6900.

### EXAMPLE 3

### Construction of the OsMADS5 Expression Cassette

[0117] A. Cloning the OsMADS5 5′-Regulatory Sequence

[0118] High-fidelity PCR was used to amplify the OsMADS5 5′-regulatory sequence from rice genomic DNA (gDNA). The 50 μL reaction mixture consisted of 100 ng rice gDNA, 200 μM dNTPs, 1 μL 20 μM oligonucleotide primer OsMADS5-P3 5′-tgagcaggtagccggcgaccaatcgcgag-3′ (SEQ ID NO 460), 1 μL 20 μM oligonucleotide primer OsMADS#5-P2 5′-catactgttacaaaaaagaaaatcagtggaccac-3′ (SEQ ID NO 461), 1 μL 10× Expand High Fidelity buffer and 1 μL Expand High Fidelity polymerase. The thermocycling program was at 95° C. for 2 minutes followed by 40 cycles of (94° C. for 15 seconds, 68° C. for 7.5 minutes) followed by 68° C. for 10 minutes. The 5.4 kb DNA product, encoding the OsMADS5 5′-regulatory sequence, was cloned with the TOPO XL PCR cloning kit. The pCR-XL-TOPO-OsMADS5-5′-gDNA recombinants, containing the OsMADS5 5′-regulatory sequence, were identified by digesting 5 μL pCR-XL-TOPO-OsMADS5-5′-gDNA miniprep DNA with EcoRI in a 20 μL reaction mixture containing 2 μg BSA and 2 μL 10× restriction endonuclease buffer. The reaction mixture was incubated at 37° C. for 2 hours then the pCR-XL-TOPO-OsMADS5-5′-gDNA (EcoRI) products were resolved on 1% TAE agarose. Positive pCR-XL-TOPO-OsMADS5-5′-gDNA clones were sequenced.

[0119] B. Cloning the OsMADS5 3′-Regulatory Sequence

[0120] High-fidelity PCR was used to amplify the OsMADS5 3′-regulatory sequence from rice genomic DNA (gDNA). The 50 μL reaction mixture consisted of 100 ng rice gDNA, 200 μM dNTPs, 1 μL 20 μM oligonucleotide primer OsMADS#5-T1 5′-atgaattgcttatcacattaatggacatc-3′ (SEQ ID NO. 462), 1 μL 20 μM oligonucleotide primer OsMADS#5-T2 5′-caaaactacatcaagagccttggaattggtcc-3′ (SEQ ID NO. 463), 1 μL 10× Expand High Fidelity buffer and 1 μL Expand High Fidelity polymerase. The thermocycling program was 95° C. for 2 minutes followed by 40 cycles of (94° C. for 15 seconds, 60° C. for 30 seconds, 68° C. for 6 minutes) followed by 68° C. for 15 minutes. The 1.2 kb OsMADS5-3′-gDNA DNA product, encoding the OsMADS5 3′-regulatory sequence, was cloned with the Zero Blunt TOPO PCR cloning kit (Invitrogen, Cat. No. K2875-20). pCR-Blunt II-TOPO-OsMADS5-3′-gDNA recombinants, with the OsMADS5 3′-regulatory sequence, were identified by digesting 5 μL pCR-Blunt II-TOPO-OsMADS5-3′-gDNA miniprep DNA with EcoRI in a 20 μL reaction mixture containing 2 μg BSA and 2 μL 10× restriction endonuclease buffer. The reaction mixture was incubated at 37° C. for 2 hours and then the pCR-Blunt II-TOPO-OsMADS5-3′-gDNA (EcoRI) products were resolved on 1% TAE agarose. Positive pCR-Blunt II-TOPO-OsMADS5-3′-gDNA clones were sequenced.

[0121] C. Construction of the OsMADS5 5′-Regulatory Sequence

[0122] The OsMADS5 5′-regulatory sequence for the expression cassette was made in several steps. The 3′-half (OsMADS-5Pb, about 3.03 kb) was produced by high-fidelity PCR from the pCR-XL-TOPO-OsMADS5-5′-gDNA clone described above. The reaction mixture consisted of 1 μL pCR-XL-TOPO-OsMADS5-5′-gDNA miniprep DNA, 200 μM dNTPs, 20 μM oligonucleotide primer OsMADS5-C3 5′-cagtgtcgacggggcgagggaaagtagagc-3′ (SEQ ID NO 464), 20 μM oligonucleotide primer OsMADS5-C4 5′-cgatccatggtggatactgttacaaaaaagaaaatcagtg-3′ (SEQ ID NO 465), 5 μL 10× cloned Pfu buffer and 2.5 Units of Pfuturbo DNA polymerase (Stratagene, Cat. No. 600252) in a final volume of 50 μL. The thermocycling program was at 95° C. for 30 seconds then 40 cycles of (95° C. for 10 seconds, 50° C. for 60 seconds, 72° C. for 6 minutes) then 72° C. for 10 minutes. The OsMADS-5Pb DNA product was recovered using the QIAquick PCR purification kit (Qiagen, Cat. No. 28106). The recovered OsMADS-5Pb DNA was ethanol precipitated with glycogen carrier. The OsMADS-5Pb DNA was recovered by micro centrifugation, washed with 70% ethanol, dried under vacuum and resuspended in 14 μL ddH₂O. The OsMADS-5Pb was digested in a 20 μL reaction mixture containing 2 μg BSA, 2 μL 10× restriction endonuclease buffer, 1 μL SalI and 1 μL NcoI. The reaction mixture was incubated at 37° C. for more than 6 hours. The OsMADS-5Pb (NcoI/SalI) DNA was resolved on 1.0% TAE agarose and the 3.03 kb OsMADS-5Pb (NcoI/SalI) DNA band was excised, recovered and ethanol precipitated with glycogen carrier. The OsMADS-5Pb (NcoI/SalI) DNA was recovered by micro centrifugation, washed with 70% ethanol, dried under vacuum and resuspended in 5 μL ddH₂O.

[0123] 2 μg of the pNOV6901 miniprep DNA was digested in a 20 μL reaction mixture containing 2 μg BSA, 2 μL 10× restriction endonuclease buffer, 1 μL SalI and 1 μL NcoI. The reaction mixture was incubated at 37° C. for more than 6 hours, then at 70° C. for 20 minutes. Then 1 μL of the appropriate 10× restriction endonuclease buffer, 1 μL 1 Unit/μL CIP and 8 μL ddH₂O were added to the reaction and it was further incubated at 37° C. for 30 minutes. The pNOV6901 (NcoI/SalI/CIP) DNA was resolved on 1.0% TAE agarose and the 4.7 kb pNOV6901 (NcoI/SalI/CIP) band was excised, recovered and ethanol precipitated with glycogen carrier. The pNOV6901 (NcoI/SalI/CIP) DNA was recovered by micro centrifugation, washed with 70% ethanol, dried under vacuum and resuspended in 5 μL ddH₂O.

[0124] 4.0 μL of the OsMADS-5Pb (NcoI/SalI) was ligated to 4.0 μL pNOV6901 (NcoI/SalI/CIP) in a 10 μL reaction mixture containing 1 μL 10× T4 DNA ligase buffer and 1 μL T4 DNA ligase (400 Units/μL) and incubated more than 8 hours at 16° C. 5.0 μL of the ligation mixture was transformed into 50 μL Top10 competent cells. pNOV6901-OsMADS-5Pb recombinants were verified by digesting 2 μL pNOV6901-OsMADS-5Pb miniprep DNA with 0.5 μL SalI, 0.5 μL NcoI in 10 μL reactions containing 1 μg BSA and 1 μL 10× restriction endonuclease buffer. The digests were incubated at 37° C. for 2 hours and the pNOV6901-OsMADS-5Pb (NcoI/SalI) DNA was resolved on 1% TAE agarose. Positive pNOV6901-OsMADS-5Pb recombinants were sequenced.

[0125] The 5′-half (OsMADS-5 Pa, about 2.4 kb) was produced by high-fidelity PCR from the pCR-XL-TOPO-OsMADS5-5′-gDNA clone described above. The reaction mixture consisted of 1 μL pCR-XL-TOPO-OsMADS5-5′-gDNA miniprep DNA, 200 μM dNTPs, 20 μM oligonucleotide primer OsMADS5-C1 5′-gactctcgaggcgcgcctgagcaggtagccggcgacc-3′ (SEQ ID NO 466), 20 μM oligonucleotide primer OsMADS5-C2b 5′-gtgtgtctcgagctctctctagctctctctcgg-3′ (SEQ ID NO 467), 5 μL 10× cloned Pfu buffer and 2.5 Units of Pfuturbo DNA polymerase (Stratagene, Cat. No. 600252) in a final volume of 50 μL. The thermocycling program was at 95° C. for 30 seconds then 40 cycles of (95° C. for 10 seconds, 50° C. for 60 seconds, 72° C. for 6 minutes) then 72° C. for 10 minutes. The 2.4 kb OsMADS-5 Pa DNA product was cloned with the Zero Blunt TOPO PCR cloning kit (Invitrogen, Cat. No. K2875-20). pCR-Blunt II-TOPO-OsMADS-5 Pa recombinants were identified by digesting 5 μL pCR-Blunt II-TOPO-OsMADS-5 Pa miniprep DNA with EcoRI in a 20 μL reaction mixture containing 2 μg BSA and 2 μL 10× restriction endonuclease buffer. The digests were incubated at 37° C. for 2 hours then resolved on 1% TAE agarose. Positive pCR-Blunt II-TOPO-OsMADS-5 Pa recombinants were sequenced.

[0126] 2 μg of the pNOV6901-OsMADS-5Pb miniprep DNA was digested in a 20 μL reaction mixture containing 2 μg BSA, 2 μL 10× restriction endonuclease buffer and 2 μL XhoI. The digest was incubated at 37° C. for more than 6 hours, then at 70° C. for 20 minutes. Then 1 μL of the appropriate 10× restriction endonuclease buffer, 1 μL 1 Unit/mL CIP and 8 μL ddH₂O were added to the reaction and it was further incubated at 37° C. for 30 minutes. 2 μg of the pCR-Blunt II-TOPO-OsMADS-5 Pa miniprep DNA was digested in a 20 μL reaction mixture containing 2 μg BSA, 2 μL 10× restriction endonuclease buffer and 2 μL SalI. The digest was incubated at 37° C. for more than 6 hours.

[0127] The digested plasmid DNAs, pNOV6901-OsMADS-5Pb (XhoI/CIP) and pCR-Blunt II-TOPO-OsMADS-5 Pa (SalI), were resolved on 1.0% TAE agarose and the 7.7 kb pNOV6901-OsMADS-5Pb (XhoI/CIP) and the 2.4 kb OsMADS-5 Pa (SalI) bands were excised, extracted, recovered and ethanol precipitated with glycogen. The pNOV6901-OsMADS-5Pb (XhoI/CIP) and OsMADS-5 Pa (SalI) DNA fragments were recovered by micro centrifugation, washed with 70% ethanol, dried under vacuum and resuspended each in 5 μL ddH₂O.

[0128] 4.0 μL of the pNOV6901-OsMADS-5Pb (XhoI/CIP) was ligated to 4.0 μL OsMADS-5 Pa (SalI) in a 10 μL reaction mixture containing 1 μL 10× T4 DNA ligase buffer and 1 μL T4 DNA ligase (400 U/μL). The reaction mixture was incubated more than 8 hours at 16° C. 5.0 μL of the ligation mixture was transformed into 50 μL Top10 competent cells. The pNOV6901-OsMADS5P recombinants were verified by digesting 2 μL pNOV6901-OsMADS5P miniprep DNA with 0.5 μL XhoI, 0.5 μL NcoI in 10 μL reaction mixtures containing 1 μg BSA and 1 μL 10× restriction endonuclease buffer. The digests were incubated at 37° C. for 2 hours then resolved on 1% TAE agarose. Positive pNOV6901-OsMADS5P recombinants were sequenced.

[0129] D. Construction of the OsMADS5 3′-Regulatory Sequence

[0130] The OsMADS-5 3′-regulatory sequence for the expression cassette was produced by high-fidelity PCR from the pCR-Blunt II-TOPO-OsMADS5-3′-gDNA clone, above. The reaction mixture consisted of 1 μL pCR-Blunt II-TOPO-OsMADS5-3′-gDNA miniprep DNA, 200 μM dNTPs, 20 μM oligonucleotide primer OsMADS5T-F 5′-cccgggccatggggggtctagaatgaattgcttatcacattaatgg-3′ (SEQ ID NO 468), 20 μM oligonucleotide primer OsMADS5T-R 5′-cccgggcgcgccggatgagaacagctacatcc-3′ (SEQ ID NO 469), 5 μL 10× cloned Pfu buffer and 2.5 Units of Pfuturbo DNA polymerase (Stratagene, Cat. No. 600252) in a final volume of 50 μL. The thermocycling program was 95° C. for 30 seconds then 40 cycles of (95° C. for 10 seconds, 50° C. for 60 seconds, 72° C. for 6 minutes) then 72° C. for 10 minutes. The OsMADS5T DNA product was recovered using the QIAquick PCR purification kit (Qiagen, Cat. No. 28106) and ethanol precipitated with glycogen carrier. The OsMADS5T DNA was recovered by micro centrifugation, washed with 70% ethanol, dried under vacuum and resuspended in 14 μL ddH₂O. The OsMADS5T DNA was digested in a 20 μL reaction mixture containing 2 μg BSA, 2 μL 10× restriction endonuclease buffer and 2 μL XmaI. The digest was incubated at 37° C. for more than 6 hours. The OsMADS5T (XmaI) DNA was resolved on 1.0% TAE agarose and the 1.1 kb OsMADS5T (XmaI) band was excised, recovered and ethanol precipitated with glycogen carrier. OsMADS5T (XmaI) DNA was recovered by micro centrifugation, washed with 70% ethanol, dried under vacuum and resuspended in 5 μL ddH₂O.

[0131] 2 μg pNOV6901-OsMADS5P miniprep DNA was digested in a 20 μL reaction mixture containing 2 μg BSA, 2 μL 10× restriction endonuclease buffer and 2 μL XmaI. The digest was incubated at 37° C. for more than 6 hours, then at 70° C. for 20 minutes. Then 1 μL of the appropriate 10× restriction endonuclease buffer, 1 μL 1 Unit/μL CIP and 8 μL ddH₂O were added to the reaction and it was further incubated at 37° C. for 30 minutes. The pNOV6901-OsMADS5P (XmaI/CIP) DNA was resolved on 1.0% TAE agarose and the 10.1 kb pNOV6901-OsMADS-5P (XmaI/CIP) band was excised, recovered and ethanol precipitated with glycogen carrier. pNOV6901-OsMADS-5P (XmaI/CIP) DNA was recovered by micro centrifugation, washed with 70% ethanol, dried under vacuum and resuspended each in 5 μL ddH₂O.

[0132] 4.0 μL pNOV6901-OsMADS5P (XmaI/CIP) was ligated to 4.0 μL OsMADS5T (XmaI) in a 10 μL ligation mixture containing 1 μL 10× T4 DNA ligase buffer and 1 μL T4 DNA ligase (400 Units/μL) and incubated more than 8 hours at 16° C. 5.0 μL of ligation mixture was transformed into 50 μL Top10 competent cells. Positive pNOV6901-OsMADS5P/OsMADS5T recombinants were verified by digesting 2 μL miniprep DNA with 1.0 μL AscI in 10 μL reaction mixtures containing 1 μg BSA and 1 μL 10× restriction endonuclease buffer. The digests were incubated at 37° C. for 2 hours then resolved on 1% TAE agarose. Positive pNOV6901-OsMADS5P/OsMADS5T recombinants were sequenced. The construct was designated pNOV6901-OsMADS5P/OsMADS5T. The plasmid's QC number is 11084. 11084 contains the complete OSMADS5 expression cassette depicted by SEQ ID NO. 536.

[0133] E. Mobilization of the OsMADS5 GUS Expression Cassette into pNOV6900

[0134] 2 μg pNOV6900 was digested in a 20 μL reaction mixture containing 2 μg BSA, 2 μL 10× restriction endonuclease buffer and 2 μL AscI. The digest was incubated at 37° C. for more than 6 hours, then at 70° C. for 20 minutes. Then 1 μL of the appropriate 10× restriction endonuclease buffer, 1 μL 1 Unit/μL CIP and 8 μL ddH₂O were added to the reaction and it was further incubated at 37° C. for 30 minutes. 2 μg pNOV6901-OsMADS5P/OsMADS5T miniprep DNA was digested in a 20 μL reaction mixture containing 2 μg BSA, 2 μL 10× restriction endonuclease buffer and 2 μL AscI. The digest was incubated at 37° C. for more than 6 hours.

[0135] The digested plasmid DNAs, pNOV6900 (AscI/CIP) and pNOV6901-OsMADS5P/OsMADS5T (AscI), were resolved on 1.0% TAE agarose and the 9.2 kb pNOV6900 (AscI/CIP) and the 8.7 kb pNOV6901-OsMADS5P/OsMADS5T (AscI) DNA bands were excised, recovered and ethanol precipitated with glycogen carrier. The pNOV6900 (AscI/CIP) and pNOV6901-OsMADS5P/OsMADS5T (AscI) DNA fragments were recovered by micro centrifugation, washed with 70% ethanol, dried under vacuum and resuspended in 5 μL ddH₂O each.

[0136] 4.0 μL pNOV6900 (AscI/CIP) was ligated to 4.0 μL pNOV6901-OsMADS5P/OsMADS5T (AscI) in a 10 μL ligation mixture containing 1 μL 10× T4 DNA ligase buffer and 1 μL T4 DNA ligase, which was incubated more than 8 hours at 16° C. 5.0 μL of ligation mixture was transformed into 50 μL Top10 competent cells. pNOV6900-pNOV6901-OsMADS5P/OsMADS5T recombinants were verified by digesting 7.5 μL pNOV6900-pNOV6901-OsMADS5P/OsMADS5T miniprep DNA with 1.0 μL NcoI in 10 μL reactions containing 1 μg BSA and 1 μL 10× restriction endonuclease buffer. The digests were incubated at 37° C. for 2 hours then resolved on 1% TAE agarose. Positive pNOV6900-pNOV6901-OsMADS5P/OsMADS5T recombinants were sequenced. The finished clone was designated pNOV6911. The plasmid's QC number is 11085.

[0137] The engineered alterations in the OsMADS5P sequence include introduction of an XhoI site followed by an AscI site at the 5′-end of the OsMADS5P sequence, elimination the natural translation start codon of the OsMADS5P sequence, elimination of undesired ORFs in the new leader sequence (5′-UTR) of the OsMADS5P sequence, insertion a Kozak sequence upstream of the new translation start codon of the OsMADS5P sequence and insertion of a new translation start codon downstream of the intron1/exon2 junction as an NcoI site in the OsMADS5P sequence. The engineered alterations in the OsMADS5T sequence include introduction of an XmaI site at the 5′-terminus of the OsMADS5T sequence and introduction of an AscI site at the 3′-terminus of the OsMADS5T sequence. In this configuration the GUS coding sequence can be replaced with any gene of interest flanked by NcoI restriction sites. The complete cassette can then be excised as an AscI fragment and cloned into pNOV6900.

[0138] The cassette was transformed into A188 X HyII maize and Kaybonnet rice using standard agrobacterium mediated methodology.

[0139] GUS Expression in T0 Maize

[0140] Fifteen T0 transgenic maize lines were generated. Tassel spikelets and leaf punches were harvested just before pollen shed and histochemically screened for GUS activity. The ear from a plant containing multiple transgene copies was sacrificed to examine GUS expression in developing florets. Gus activity localized primarily to transmitting tissue at the base of each floret, and to a lesser extent, the vascular bundles in developing ears. GUS activity was also apparent in developing silks. These data indicate the cassette drives GUS expression primarily in female reproductive tissue.

[0141] GUS Expression in T0 Rice

[0142] Of forty T0 rice (cv. Kaybonnet) lines containing pNOV6911 (or 11085), eighteen independent transformants were histochemically stained for GUS expression. Only four events had detectable GUS activity in leaf tissue. In most events, activity in spikelets was localized to glume tips, and anthers to a much lesser extent.

[0143] GUS Expression in T1 Maize

[0144] T1 progeny from three events were sown for expression analysis in vegetative and reproductive tissue. FIG. 3 summarizes data for tissue sampled about 5 days before pollination. FIGS. 3A and 3B show GUS activity is restricted to developing ears, particularly the vasculature along the outer ear and the transmitting tissue beneath florets. FIG. 3B also shows GUS activity in tissue surrounding the ovule sac. GUS activity was undetectable in the ear node or the node beneath it, tassel, leaf or silk (FIGS. 3C-3G). FIGS. 4 and 5 provide further evidence for GUS activity in developing ears. The data show the pattern established at 5 days before pollination persists up to 2 days after pollination. GUS activity becomes restricted to transmitting tissue and maternal tissue at the base of developing kernels during seed development. GUS protein is detectable throughout ovule and kernel development, up to 20 days after pollination. FIG. 25A shows very light staining in the aerial tissue, with no GUS activity in the roots

[0145] In summary, the present invention includes expression cassettes based on the Oryza sativa OsMADS5 gene. These cassettes consist of the gene's promoter including the first intron, 5′-UTR, 3′-UTR and 3′-nontranscribed sequence. The cassette's design facilitates replacement of the GUS coding sequence with any gene of interest. The cassette drives gene expression primarily in maternal reproductive tissue. Within developing ears, expression localizes to the outer vasculature along the long axis of the ear, the transmitting tissue in developing florets and kernels, tissue surrounding ovules and maternal tissue at the base of developing kernels. The expression cassettes of the present invention drive gene expression from a very early point in ovule development, perhaps from shortly after differentiation.

### EXAMPLE 4

### Construction of the OsMADS6 Expression Cassette

[0146] A. Cloning of the OsMADS6 5′-Regulatory Sequence

[0147] Used high-fidelity PCR to amplify the OsMADS6 5′-regulatory sequence from rice genomic DNA (gDNA). The 50 μL reaction mixture consisted of 100 ng rice gDNA, 200 μM dNTPs, 1 μL 20 μM oligonucleotide primer OsMADS#6-P1 5′-ctaggacgatggtgtgatgtgggaacacg-3′ (SEQ ID NO 470), 1 μL 20 μM oligonucleotide primer OsMADS#6-P2 5′-gtacctttctaaagtctttgttatgctgcac-3′ (SEQ ID NO 471), 1 μL 10× Expand High Fidelity buffer and 1 μL Expand High Fidelity polymerase. The thermocycling program was at 95° C. for 2 minutes followed by 40 cycles of (94° C. for 15 seconds, 68° C. for 7.5 minutes) followed by 68° C. for 10 minutes. Cloned the 4.5 kb OsMADS6-5′-gDNA DNA product with the TOPO XL PCR cloning kit. pCR-XL-TOPO-OsMADS6-5′-gDNA recombinants were identified by digesting 5 μL pCR-XL-TOPO-OsMADS6-5′-gDNA miniprep DNA with EcoRI in a 20 μL reaction mixture containing 2 μg BSA and 2 μL 10× restriction endonuclease buffer. The digests were incubated at 37° C. for 2 hours then the products were resolved on 1% TAE agarose. The positive pCR-XL-TOPO-OsMADS6-5′-gDNA clones were sequenced.

[0148] B. Cloning of the OsMADS6 3′-Regulatory Sequence

[0149] The OsMADS6 3′-regulatory sequence from rice genomic DNA (gDNA) was amplified using high-fidelity PCR. The 50 μL reaction mixture consisted of 100 ng rice gDNA, 200 μM dNTPs, 1 μL 20 μM oligonucleotide primer OsMADS#6-T1 5′-gctaagcagccatcgatcagctgtcag-3′ (SEQ ID NO 470), 1 μL 20 μM oligonucleotide primer OsMADS#6-T2 5′-gatgccattgtgtaatgaatggaggagagc-3′ (SEQ ID NO 471), 1 μL 10× Expand High Fidelity buffer and 1 μL Expand High Fidelity polymerase. The thermocycling program was at 95° C. for 2 minutes followed by 40 cycles of (94° C. for 15 seconds, 60° C. for 30 seconds, 68° C. for 6 minutes) followed by 68° C. for 15 minutes. The 1.2 kb DNA product was cloned with the Zero Blunt TOPO PCR cloning kit. The pCR-II-Blunt-OsMADS6-3′-gDNA recombinants were identified by digesting 5 μL pCR-II-Blunt-OsMADS6-3′-gDNA miniprep DNA with EcoRI in a 20 μL reaction mixture containing 2 μg BSA and 2 μL 10× restriction endonuclease buffer. The digests were incubated at 37° C. for 2 hours then resolved on 1% TAE agarose. Positive pCR-II-Blunt-OsMADS6-3′-gDNA clones were sequenced.

[0150] C. Construction of the OsMADS6 5′-Regulatory Sequence

[0151] The OsMADS6 5′-regulatory sequence for the expression cassette was made in several steps. The 3′-half (OsMADS-6Pb, about 2.96 kb) was produced by high-fidelity PCR from the OsMADS6 5′-gene regulatory sequence clone, above. The reaction mixture consisted of 1 μL pCR-XL-TOPO-OsMADS6-5′-gDNA miniprep DNA, 200 μM dNTPs, 20 μM oligonucleotide primer OsMADS6-P3b 5′-cgagtcgacgaggggaagagttgagctgag-3′ (SEQ ID NO 474), 20 μM oligonucleotide primer OsMADS6-P4c 5′-gactccatggtggttatgctgcacaaaaatg-3′ (SEQ ID NO 475), 5 μL 10× cloned Pfu buffer and 2.5 Units of Pfuturbo DNA polymerase (Stratagene, Cat. No. 600252) in a final volume of 50 μL. The thermocycling program was at 95° C. for 30 seconds then 40 cycles of (95° C. for 10 seconds, 50° C. for 60 seconds, 72° C. for 6 minutes) then 72° C. for 10 minutes. The DNA product was cloned with the Zero Blunt TOPO PCR cloning kit. The pCR-Blunt-II-TOPO-OsMADS6-Pb recombinants were identified by digesting 5 μL pCR-Blunt-II-TOPO-OsMADS6-Pb miniprep DNA with EcoRI in a 20 μL reaction mixture containing 2 μg BSA and 2 μL 10× restriction endonuclease buffer. The digests were incubated at 37° C. for 2 hours then resolved on 1% TAE agarose. Positive pCR-Blunt-II-TOPO-OsMADS6-Pb recombinants were sequenced.

[0152] The 5′-half (OsMADS-6 Pa, about 1.5 kb) was produced by high-fidelity PCR from the pCR-XL-TOPO-OsMADS6-5′-gDNA clone, above. The reaction mixture consisted of 1 μL pCR-XL-TOPO-OsMADS6-5′-gDNA miniprep DNA, 200 μM dNTPs, 20 μM oligonucleotide primer OsMADS6-Clb 5′-cagtgcatgcggaccgctaggacgatggtgtgatgtg-3′ (SEQ ID NO 476), 20 μM oligonucleotide primer OsMADS6-Paa 5′-cctcgtcgactcgcccgatcgatcgaacg-3′ (SEQ ID NO 477), 5 μL 10× cloned Pfu buffer and 2.5 Units of Pfuturbo DNA polymerase in a final volume of 50 μL. The thermocycling program was at 95° C. for 30 seconds then 40 cycles of (95° C. for 10 seconds, 50° C. for 60 seconds, 72° C. for 6 minutes) then 72° C. for 10 minutes. The 1.5 kb OsMADS6-Pa DNA product was cloned with the Zero Blunt TOPO PCR cloning kit. The pCR-Blunt-II-TOPO-OsMADS6-Pa recombinants were identified by digesting 5 μL pCR-Blunt-II-TOPO-OsMADS6-Pa miniprep DNA with EcoRI in a 20 μL reaction mixture containing 2 μg BSA and 2 μL 10× restriction endonuclease. The digests were incubated at 37° C. for 2 hours then resolved on 1% TAE agarose. Positive pCR-Blunt-II-TOPO-OsMADS6-Pa recombinants were sequenced.

[0153] 14 μL pCR-Blunt-II-TOPO-OsMADS6-Pb miniprep DNA was digested in a 20 μL reaction mixture containing 2 μg BSA, 2 μL 10× restriction endonuclease buffer, 1 μL SalI and 1 μL NcoI. The digest was incubated at 37° C. for more than 6 hours. The digested DNA was resolved on 1.0% TAE agarose and the 2.96 kb OsMADS6-Pb (SalI/NcoI) DNA band was excised, recovered and ethanol precipitated with glycogen. The OsMADS6-Pb (SalI/NcoI) DNA was recovered by micro centrifugation, washed with 70% ethanol, dried under vacuum and resuspended in 5 μL ddH₂O.

[0154] 2 μg pNOV6901 miniprep DNA was digested in a 20 μL reaction mixture containing 2 μg BSA, 2 μL 10× restriction endonuclease buffer, 1 μL SalI and 1 μL NcoI. The digest was incubated at 37° C. for more than 6 hours, then at 70° C. for 20 minutes. Then 1 μL of the appropriate 10× restriction endonuclease buffer, 1 μL 1 Unit/μL CIP and 8 μL ddH₂O were added to the reaction and it was further incubated at 37° C. for 30 minutes. The digested plasmid DNA was resolved on 1.0% TAE agarose and the 4.7 kb pNOV6901 (SalI/NcoI/CIP) band was excised, recovered and ethanol precipitated with glycogen. The pNOV6901 (SalI/NcoI/CIP) DNA was recovered by micro centrifugation, washed with 70% ethanol, dried under vacuum and resuspended in 5 μL ddH₂O.

[0155] 4.0 μL OsMADS6-Pb (SalI/NcoI) was ligated to 4.0 μL pNOV6901 (SalI/NcoI/CIP) in a 10 μL ligation mixture containing 1 μL 10× T4 DNA ligase buffer and 1 μL T4 DNA ligase (400 Units/μL). The ligation mixture was incubated for more than 8 hours at 16° C. 5.0 μL of ligation mixture was transformed into 50 μL Top10 competent cells. The recombinants were verified by digesting 2 μL pNOV6901-OsMADS6-Pb miniprep DNA with 0.5 μL SalI, 0.5 μL NcoI in 10 μL reaction mixtures containing 1 μg BSA and 1 μL 10× restriction endonuclease buffer. The digests were incubated at 37° C. for 2 hours then resolved on 1% TAE agarose. Positive pNOV6901-OsMADS6-Pb recombinants were sequenced.

[0156] 2 μg pNOV6901-OsMADS6-Pb miniprep DNA was digested in a 20 μL reaction mixture containing 2 μg BSA, 2 μL 10× restriction endonuclease buffer, 1 μL SalI and 1 μL SphI. The digest was incubated at 37° C. for more than 6 hours, then at 70° C. for 20 minutes. Then 1 μL of the appropriate 10× restriction endonuclease buffer, 1 μL 1 Unit/mL CIP and 8 μL ddH₂O were added to the reaction and it was further incubated at 37° C. for 30 minutes. 2 μg pCR-Blunt-II-TOPO-OsMADS6-Pa miniprep DNA was digested in a 20 μL reaction containing 2 μg BSA, 2 μL 10× restriction endonuclease buffer, 1 μL SalI and 1 μL SphI. The digest was incubated at 37° C. for more than 6 hours.

[0157] The digested plasmid DNAs, pNOV6901-OsMADS6-Pb (SalI/SphI/CIP) and pCR-Blunt-II-TOPO-OsMADS6-Pa (SalI/SphI), were resolved on 1.0% TAE agarose and the 7.7 kb pNOV6901-OsMADS6-Pb (SalI/SphI/CIP) and the 1.5 kb OsMADS6-Pa (SalI/SphI) bands were excised, recovered and ethanol precipitated with glycogen carrier. The pNOV6901-OsMADS6-Pb (SalI/SphI/CIP) and OsMADS6-Pa (SalI/SphI) DNA fragments were recovered by micro centrifugation, washed with 70% ethanol, dried under vacuum and each resuspended in 5 μL ddH₂O.

[0158] 4.0 μL pNOV6901-OsMADS6-Pb (SalI/SphI/CIP) was ligated to 4.0 μL OsMADS6-Pa (SalI/SphI) in a 10 μL reaction mixture containing 1 μL 10× T4 DNA ligase buffer and 1 μL T4 DNA ligase (400 U/μL). The reaction mixture was incubated for more than 8 hours at 16° C. 5.0 μL of ligation mixture was transformed into 50 μL Top10 competent cells. The pNOV6901-OsMADS6P recombinants were verified by digesting 7.5 PLL pNOV6901-OsMADS6P miniprep DNA with 0.5 μL SphI, 0.5 μL NcoI in 10 μL reactions containing 1 μg BSA and 1 μL 10× restriction endonuclease buffer. Digests were incubated at 37° C. for 2 hours then resolved on 1% TAE agarose. Positive pNOV6901-OsMADS6P recombinants were sequenced.

[0159] D. Construction of the OsMADS6 3′-Regulatory Sequence

[0160] The OsMADS-6 3′-regulatory sequence for the expression cassette, about 1.3 kb, was produced by high-fidelity PCR from the pCR-II-Blunt-OsMADS6-3′-gDNA clone, above. The reaction mixture consisted of 1 μL pCR-II-Blunt-OsMADS6-3′-gDNA miniprep DNA, 200 μM dNTPs, 20 μM oligonucleotide primer OsMADS6-C4b 5′-acgtgagctcgctaagcagccatcgatcag-3′ (SEQ ID NO 478), 20 μM oligonucleotide primer OsMADS6-C2 5′-actgcggaccgatgccattgtgtaatgaatgg-3′ (SEQ ID NO 479), 5 μL 10× cloned Pfu buffer and 2.5 Units of Pfuturbo DNA polymerase in a final volume of 50 μL. The thermocycling program was at 95° C. for 30 seconds then 40 cycles of (95° C. for 10 seconds, 50° C. for 60 seconds, 72° C. for 6 minutes) then 72° C. for 10 minutes. The 1.3 kb OsMADS6T DNA product was recovered and ethanol precipitated with glycogen. Recovered the OsMADS6T DNA by micro centrifugation, washed with 70% ethanol, dried under vacuum and resuspended in 14 μL ddH₂O. The OsMADS6T DNA was digested in a 20 μL reaction mixture containing 2 μg BSA, 2 μL 10× restriction endonuclease buffer, and 2 μL SmaI. The digest was incubated at 37° C. for more than 6 hours. The OsMADS6T (SmaI) DNA was resolved on 1.0% TAE agarose and the 1.3 kb OsMADS6T (SmaI) band was excised, recovered and ethanol precipitated with glycogen carrier. The OsMADS6T (SmaI) DNA was recovered by micro centrifugation, washed with 70% ethanol, dried under vacuum and resuspended in 5 μL ddH₂O.

[0161] 2 μg pNOV6901-OsMADS6P miniprep DNA was digested in a 20 μL reaction mixture containing 2 μg BSA, 2 μL 10× restriction endonuclease buffer and 2 μL SmaI. The digest was incubated at 37° C. for more than 6 hours, then at 70° C. for 20 minutes. Then 1 μL of the appropriate 10× restriction endonuclease buffer, 1 μL 1 Unit/μL CIP and 8 μL ddH₂O were added to the reaction and it was further incubated at 37° C. for 30 minutes. The pNOV6901-OsMADS6P (SmaI/CtP) DNA was resolved on 1.0% TAE agarose and the 9.7 kb pNOV6901-OsMADS6P (SmaI/CIP) band was excised, recovered and ethanol precipitated with glycogen carrier. The pNOV6901-OsMADS6P (SmaI/CIP) DNA fragment was recovered by micro centrifugation, washed with 70% ethanol, dried under vacuum and resuspended in 5 μL ddH₂O.

[0162] 4.0 μL pNOV6901-OsMADS6P (SmaI/CIP) was ligated to 4.0 μL OsMADS6T (SmaI) in a 10 μL reaction mixture containing 1 μL 10× T4 DNA ligase buffer and 1 μL T4 DNA ligase (400 Units/μL). The reaction mixture was incubated more than 8 hours at 16° C. 5.0 μL of ligation mixture was transformed into 50 μL Top10 competent cells. The recombinants were verified by digesting 2 μL pNOV6901-OsMADS6P/OsMADS6T miniprep DNA with 1.0 μL RsrII in 10 μL reaction mixtures containing 1 μg BSA and 1 μL 10× restriction endonuclease buffer. The digests were incubated at 37° C. for 2 hours then resolved on 1% TAE agarose. Positive pNOV6901-OsMADS6P/OsMADS6T recombinants were sequenced. Designated the vector pNOV6901-OsMADS6P/OsMADS6T. The plasmid's QC number is 11082. 11082 contains the OsMADS6 expression cassette depicted by SEQ ID NO. 537.

[0163] E. Mobilization of the OsMADS6 GUS Expression Cassette into pNOV6900

[0164] 2 μg pNOV6900 was digested in a 20 μL reaction mixture containing 2 μg BSA, 2 μL 10× restriction endonuclease buffer and 2 μL RsrII. The digest was incubated at 37° C. for more than 6 hours, then at 70° C. for 20 minutes. Then 1 μL of the appropriate 10× restriction endonuclease buffer, 1 μL 1 Unit/μL CIP and 8 μL ddH₂O were added to the reaction and it was further incubated at 37° C. for 30 minutes. 2 μg pNOV6901-OsMADS6P/OsMADS6T miniprep DNA was digested in a 20 μL reaction mixture containing 2 μg BSA, 2 μL 10× restriction endonuclease buffer and 2 μL RsrII. The digest was incubated at 37° C. for more than 6 hours.

[0165] The pNOV6900 (RsrII/CIP) and the pNOV6901-OsMADS6P/OsMADS6T (RsrII) plasmid DNAs were resolved on 1.0% TAE agarose, and the 9.2 kb pNOV6900 (RsrII/CIP) and the 8.0 kb pNOV6901-OsMADS6P/OsMADS6T (RsrII) bands were excised, recovered and ethanol precipitated with glycogen carrier. The pNOV6900 (RsrII/CIP) and pNOV6901-OsMADS6P/OsMADS6T (RsrII) DNA fragments were recovered by micro centrifugation, washed with 70% ethanol, dried under vacuum and resuspended in 5 μL ddH₂O each.

[0166] 4.0 μL pNOV6900 (RsrII/CIP) was ligated to 4.0 μL pNOV6901-OsMADS6P/OsMADS6T (RsrII) in a 10 μL ligation mixture containing 1 μL 10× T4 DNA ligase buffer and 1 μL T4 DNA ligase (400 U/μL). The ligation mixture was incubated more than 8 hours at 16° C. 5.0 μL of ligation mixture was transformed into 50 μL Top10 competent cells. The pNOV6900-pNOV6901-OsMADS6P/OsMADS6T recombinants were verified by digesting 2 μL miniprep DNA with 1.0 μL NcoI in 10 μL reaction mixtures containing 1 μg BSA and 1 μL 10× restriction endonuclease buffer. The digests were incubated at 37° C. for 2 hours then resolved on 1% TAE agarose. Positive pNOV6900-pNOV6901-OsMADS6P/OsMADS6T recombinants were sequenced. The finished clone was designated pNOV6907. The plasmid's QC number is 11083.

[0167] The engineered alterations in the 5′-regulatory sequence derived from the OsMADS6 gene include introduction of an SphI site followed by an RsrII site at the 5′-end of OsMADS6P, elimination of the natural translation start codon in OsMADS6P, elimination of undesired open reading frames in the new 5′-untranslated leader sequence transcribed from OsMADS6P, insertion of a Kozak sequence upstream of the new translation start codon in OsMADS6P and insertion of the new translation start codon downstream of the intron1/exon2 junction in OsMADS6P as an NcoI site. The engineered alterations in the 3′-gene regulatory sequence derived from the OsMADS6 gene include introduction of a SacI site at the 5′-terminus of OsMADS6T and introduction of an RsrII site at the 3′-terminus of OsMADS6T. In this configuration the GUS coding sequence can be replaced with any gene of interest flanked by NcoI/NotI or NcoI/SacI restriction sites. The complete cassette is mobilized, as an RsrII fragment, to the binary vector pNOV6900.

[0168] The cassette was transformed into A188 X HyII maize and Kaybonnet rice using standard agrobacterium mediated methodology.

[0169] GUS Expression in T0 Maize

[0170] One hundred-two T0 transgenic maize lines were generated. Tassel spikelets were histochemically screened for GUS activity. Sixty-four events were positive for GUS activity in the tassel glume, and some also stained positive at the spikelet base. Fifty-six also showed GUS expression in leaf punches. Ears from several plants were sacrificed to examine GUS expression in developing florets. GUS activity localizes primarily to vascular bundles in developing ears, which appears connected to transmitting tissue in each floret. These data indicate the cassette drives GUS expression primarily in female reproductive tissue.

[0171] GUS Expression in T0 Rice

[0172] Forty-one T0 rice lines containing pNOV6907 were generated. Twenty independent transformants were histochemically stained for GUS expression. Light to strong GUS activity was detected in leaf tissue. In most events, activity in spikelets localized to glumes. Staining intensity varied significantly. Seed were collected for each line, but were not further analyzed.

[0173] GUS Expression in T1 Maize

[0174] T1 progeny from two independent transformants were sown and analyzed in detail for GUS expression. FIGS. 8A-8C show there was no detectable GUS expression in silk, leaf and tassel. This indicates tassel and leaf expression observed in T0 plants may result from tissue culture associated with the transformation process. Dissected organs from T1 tassel spikelets had no apparent GUS activity (data not shown). FIGS. 8D-8E show GUS activity in the ear node and the developing ear shoot. FIG. 8D shows residual GUS activity in the central pith, and most activity in the developing ear shoot. Ear activity is confined to the node, the outer whorls and the central region. The pith beneath the ear node has no detectable GUS activity. FIG. 9 shows GUS activity in ears from 8 to 2 days prior to pollination. As in T0 ears, activity is confined to the vaculature, florets and transmitting tissue. Post-pollination GUS activity remains confined to the same tissues (FIG. 10). Activity in developing kernels appears restricted to maternal tissue. FIG. 11 shows this pattern persists through kernel development. No activity is detected in the endosperm or developing embryo, it localizes to the placental, funicular and hilar regions of developing kernels. GUS protein is detectable throughout ovule and kernel development, up to 20 days after pollination. These data support the OsMADS6 cassette as a very good candidate for trait expression in developing florets and kernels. When driven by the OsMADS6-based expression cassette, genes that facilitate phloem unloading such as invertase or a sucrose transporter should prove effective in supporting early ear development by increasing sink strength. FIG. 25B shows very light or no staining in the aerial tissue, with no GUS activity in the roots

[0175] One embodiment of the invention is an expression cassette based on the Oryza sativa OsMADS6 gene. The expression cassette consists of the gene's promoter including the first intron, 5′-UTR, 3′-UTR and 3′-nontranscribed sequence. These components were assembled into a GUS expression cassette and tested in transgenic plants. The cassette's design facilitates replacement of the GUS coding sequence with any gene of interest. The expression cassette drives gene expression primarily in maternal reproductive tissue. Within developing ears, expression localizes to florets, maternal components of developing kernels, the placental or transmitting tissue and vasculature. The expression cassettes of the present invention further drive gene expression from a very early point in ovule development, perhaps from shortly after differentiation.

### EXAMPLE 5

### Construction of the OsMADS8 Expression Cassette

[0176] A. Cloning of the OsMADS8 5′-Regulatory Sequence

[0177] The OsMADS8 5′-regulatory sequence from rice genomic DNA (gDNA) was amplified using high-fidelity PCR. The 50 μL reaction mixture consisted of 100 ng rice gDNA, 200 μM dNTPs, 1 μL 20 μM oligonucleotide primer OsMADS8.P1 5′-ggtatctttccaaagttctggtcatgctgc-3′ (SEQ ID NO 522), 1 μL 20 μM oligonucleotide primer OsMADS8.P2 5′-ccattttttgcgaaatgccaaatcctggc-3′ (SEQ ID NO 523), 1 μL 10× Expand High Fidelity buffer and 1 μL Expand High Fidelity polymerase. The thermocycling program was at 95° C. for 2 minutes followed by 40 cycles of (94° C. for 15 seconds, 68° C. for 7.5 minutes) followed by 68° C. for 10 minutes. The 5.2 kb OsMADS8-5′-gDNA DNA product was cloned with the TOPO XL PCR cloning kit. The pCR-XL-TOPO-OsMADS8-5′-gDNA was identified by digesting 5 μL pCR-XL-TOPO-OsMADS8-5′-gDNA miniprep DNA with EcoRI in a 20 μL reaction mixture containing 2 μg BSA and 2 μL 10× restriction endonuclease buffer. The digests were incubated at 37° C. for 2 hours then resolved on 1% TAE agarose. Positive pCR-XL-TOPO-OsMADS8-5′-gDNA clones were sequenced.

[0178] B. Cloning of the OsMADS8 3′-Regulatory Sequence

[0179] The OsMADS8 3′-regulatory sequence from rice genomic DNA (gDNA) was amplified using high-fidelity PCR. The 50 μL reaction mixture consisted of 100 ng rice gDNA, 200 μM dNTPs, 1 μL 20 μM oligonucleotide primer OsMADS8.T1 5′-acgtgagctcactcctgaaggccgatgcgacaacc-3′ (SEQ ID NO 480), 1 μL 20 μM oligonucleotide primer OsMADS8.T2 5′-agtcatcgatcatgacaaaatatcatgtttatttcgagg-3′ (SEQ ID NO 481), 1 μL 10× Expand High Fidelity buffer and 1 μL Expand High Fidelity polymerase. The thermocycling program was 95° C. for 2 minutes followed by 40 cycles of (94° C. for 15 seconds, 60° C. for 30 seconds, 68° C. for 6 minutes) followed by 68° C. for 15 minutes. Cloned the 2.04 kb OsMADS8-3′-gDNA DNA product with the Zero Blunt TOPO PCR cloning kit. The pCR-Blunt-II-OsMADS8-3′-gDNA recombinants were identified by digesting 5 μL miniprep DNA with EcoRI in a 20 μL reaction mixture containing 2 μg BSA and 2 μL 10× restriction endonuclease buffer. The digests were incubated at 37° C. for 2 hours then resolved on 1% TAE agarose. Positive pCR-Blunt-II-OsMADS8-3′-gDNA clones were sequenced.

[0180] C. Construction of the OsMADS8 5′-Regulatory Sequence

[0181] The OsMADS8 5′-regulatory sequence for the expression cassette was made in several steps. The 3′-half (OsMADS-8Pb, about 2.8 kb) was produced by high-fidelity PCR from pCR-XL-TOPO-OsMADS8-5′-gDNA, above. The reaction mixture consisted of 1 μL pCR-XL-TOPO-OsMADS8-5′-gDNA miniprep DNA, 200 μM dNTP mixture, 20 μM oligonucleotide primer OsMADS8-Pcc 5′-atcgccatggtggtcaagctgcaagtttcaaaaacac-3′ (SEQ ID NO 482), 20 μM oligonucleotide primer OsMADS8-C3 5′-acgtgtcgacgagagggagggtgga-3′ (SEQ ID NO 483), 5 μL 10× cloned Pfu buffer and 2.5 Units of Pfuturbo DNA polymerase in a final volume of 50 μL. The thermocycling program was at 95° C. for 30 seconds then 40 cycles of (95° C. for 10 seconds, 50° C. for 60 seconds, 72° C. for 6 minutes) then 72° C. for 10 minutes. The 2.8 kb OsMADS-8Pb DNA product was cloned with the Zero Blunt TOPO PCR cloning kit. The pCR-Blunt-II-TOPO-OsMADS-8Pb recombinants were identified by digesting 5 μL pCR-Blunt-II-TOPO-OsMADS-8Pb miniprep DNA with EcoRI in a 20 μL reaction mixture containing 2 μg BSA and 2 μL 10× restriction endonuclease buffer. Digests were incubated at 37° C. for 2 hours then resolved on 1% TAE agarose. Positive pCR-Blunt-II-TOPO-OsMADS-8Pb clones were sequenced.

[0182] The 5′-half (OsMADS-8 Pa, about 2.4 kb) was produced by high-fidelity PCR from pCR-XL-TOPO-OsMADS8-5′-gDNA, above. The reaction mixture consisted of 1 μL pCR-XL-TOPO-OsMADS8-5′-gDNA miniprep DNA, 200 μM dNTP mixture, 20 μM oligonucleotide primer OsMADS8-C5b 5′-tcctcctcctcctcctccacctcacct-3′ (SEQ ID NO 484), 20 μM oligonucleotide primer OsMADS8-Clb 5′-aactaaatcgcctgcaggcggaccgttttttgcgaaatgcc-3′ (SEQ ID NO 485), 5 μL 10× cloned Pfu buffer and 2.5 Units of Pfuturbo DNA polymerase in a final volume of 50 μL. The thermocycling program was at 95° C. for 30 seconds then 40 cycles of (95° C. for 10 seconds, 50° C. for 60 seconds, 72° C. for 6 minutes) then 72° C. for 10 minutes. The 2.4 kb OsMADS-8 Pa DNA product was cloned with the Zero Blunt TOPO PCR cloning kit. The pCR-Blunt-II-TOPO-OsMADS-8 Pa recombinants were identified by digesting 5 μL pCR-Blunt-II-TOPO-OsMADS-8 Pa miniprep DNA with EcoRI in a 20 μL reaction mixture containing 2 μg BSA and 2 μL 10× restriction endonuclease buffer. Digests were incubated at 37° C. for 2 hours then resolved on 1% TAE agarose. Positive pCR-Blunt-II-TOPO-OsMADS-8Pb clones were sequenced.

[0183] 14 μL pCR-Blunt-II-TOPO-OsMADS-8Pb miniprep DNA was digested in a 20 μL reaction mixture containing 2 μg BSA, 2 μL 10× restriction endonuclease buffer, 1 μL SalI and 1 μL NcoI. The digest was incubated at 37° C. for more than 6 hours. The pCR-Blunt-II-TOPO-OsMADS-8Pb (SalI/NcoI) DNA was resolved on 1.0% TAE agarose and the 2.96 kb OsMADS-8Pb (SalI/NcoI) band was excised, recovered and ethanol precipitated with glycogen carrier. OsMADS-8Pb (SalI/NcoI) DNA was recovered by micro centrifugation, washed with 70% ethanol, dried under vacuum and resuspended in 5 μL ddH₂O.

[0184] 2 μg pNOV6901 miniprep DNA was digested in a 20 μL reaction mixture containing 2 μg BSA, 2 μL 10× restriction endonuclease buffer, 1 μL SalI and 1 μL NcoI. The digest was incubated at 37° C. for more than 6 hours, then at 70° C. for 20 minutes. Then 1 μL of the appropriate 10× restriction endonuclease buffer, 1 μL 1 Unit/μL CIP and 8 μL ddH₂O were added to the reaction and it was further incubated at 37° C. for 30 minutes. The pNOV6901 (SalI/NcoI/CIP) plasmid DNA was resolved on 1.0% TAE agarose and the 4.7 kb pNOV6901 (SalI/NcoI/CIP) DNA band was excised, recovered and ethanol precipitated with glycogen carrier. The pNOV6901 (SalI/NcoI/CIP) DNA was recovered by micro centrifugation, washed with 70% ethanol, dried under vacuum and resuspended in 5 μL ddH₂O. 4.0 μL OsMADS-8Pb (SalI/NcoI) was ligated to 4.0 μL pNOV6901 (SalI/NcoI/CIP) in a 10 μL reaction mixture containing 1 μL 10× T4 DNA ligase buffer and 1 μL T4 DNA ligase (400 Units/μL), which was incubated more than 8 hours at 16° C. 5.0 μL of ligation mixture was transformed into 50 μL Top10 competent cells. The pNOV6901-OsMADS-8Pb recombinants were verified by digesting 2 μL pNOV6901-OsMADS-8Pb miniprep DNA with 0.5 μL SalI, 0.5 μL NcoI in 10 μL reaction mixtures containing 1 μg BSA and 1 μL 10× restriction endonuclease buffer. The digests were incubated at 37° C. for 2 hours then resolved on 1% TAE agarose. Positive pNOV6901-OsMADS-8Pb recombinants were sequenced.

[0185] An SbfI restriction site was introduced to pNOV6901-OsMADS-8Pb by ligating Synthetic Adapter III to the construct. Synthetic Adapter III was made by combining 40 μL of 50 μM oligonucleotide 8PA-1 5′-Pggagatcggg-3′ (SEQ ID NO 486), 40 μL of 50 μM oligonucleotide 8PA-2 5′-Ptcgacccgatcacc-3′ (SEQ ID NO 487)—where P is a 5′-phosphate group—in a 100 μL mixture that is 25 mM in Tris-HCl (pH 8.0) and 10 mM in MgCl₂. The mixture was boiled for 5 minutes, removed from heat and naturally cooled to room temperature (about 60 minutes). This yielded a 20 μM Synthetic Adapter III mixture.

[0186] pNOV6901-OsMADS-8Pb was prepared by digesting 14 μL pNOV6901-OsMADS-8Pb miniprep DNA with 2 μL SalI in a 20 μL reaction mixture containing 2 μg BSA and 2 μL 10× restriction endonuclease buffer. The digest was incubated at 37° C. for 6 hours, then at 70° C. for 20 minutes. Then 1 μL of the appropriate 10× restriction endonuclease buffer, 1 μL 1 Unit/μL CIP and 8 μL ddH₂O were added to the reaction and it was further incubated at 37° C. for 30 minutes. The pNOV6901-OsMADS-8Pb (SalI/CIP) DNA was resolved on 1% TAE agarose, excised, recovered and ethanol precipitated with glycogen carrier. The pNOV6901-OsMADS-8Pb (SalI/CIP) DNA was recovered by micro centrifugation, washed with 70% ethanol, dried under vacuum and resuspended in 5 μL ddH₂O.

[0187] 4.5 μL Synthetic Adapter III mixture was ligated to 2.5 μL pNOV6901-OsMADS-8Pb (SalI/CIP) in a 10 μL ligation mixture containing 1 μL 10× T4 DNA ligase buffer and 1 μL T4 DNA ligase (400 U/μL), which was incubated more than 8 hours at 16° C. 4 μL of ligation mixture was transformed into 50 μL XL-1 supercompetent cells (Stratagene, Cat. No. 200236). The pNOV6901-OsMADS-8Pb-SbfI recombinants were verified by digesting 7.5 μL pNOV6901-OsMADS-8Pb-SbfI miniprep DNA in a 10 μL reaction mixture containing 1 μg BSA, 1 μL 10× restriction endonuclease buffer and 1 μL SalI. The digests were incubated at 37° C. for 2 hours then resolved on 1.0% TAE agarose. The pNOV6901-OsMADS-8Pb-SbfI recombinants that lost the SalI restriction site were digested with SbfI in a 10 μL reaction mixture containing 1 μg BSA, 1 μL 10× SEBuffer Y restriction endonuclease buffer and 1 μL SbfI (New England Biolabs). The digests were incubated at 37° C. for 2 hours then resolved on 1.0% TAE agarose. Positive pNOV6901-OsMADS-8Pb-SbfI recombinants were sequenced.

[0188] 2 μg pNOV6901-OsMADS-8Pb-SbfI miniprep DNA was disgested in a 20 μL reaction mixture containing 2 μg BSA, 2 μL 10× restriction endonuclease buffer and 2 μL SbfI. The digest was incubated at 37° C. for more than 6 hours, then at 70° C. for 20 minutes. Then 1 μL of the appropriate 10× restriction endonuclease buffer, 1 μL 1 Unit/μL CIP and 8 μL ddH₂O were added to the reaction and it was further incubated at 37° C. for 30 minutes. 2 μg pCR-Blunt-II-TOPO-OsMADS-8 Pa miniprep DNA was digested in a 20 μL reaction mixture containing 2 μg BSA, 2 μL 10× restriction endonuclease buffer and 2 μL SbfI. The digest was incubated at 37° C. for more than 6 hours.

[0189] The digested plasmid DNAs, pNOV6901-OsMADS-8Pb-SbfI (SbfI/CIP) and pCR-Blunt-II-TOPO-OsMADS-8 Pa (SbfI), were resolved on 1.0% TAE agarose and the 7.5 kb pNOV6901-OsMADS-8Pb (SbfI/CIP) and the 2.4 kb OsMADS-8 Pa (SbfI) bands were excised, recovered and ethanol precipitated with glycogen carrier. The DNA fragments were recovered by micro centrifugation, washed with 70% ethanol, dried under vacuum and each resuspended in 5 μL ddH₂O.

[0190] 4.0 μL pNOV6901-OsMADS-8Pb (SbfI/CIP) was ligated to 4.0 μL OsMADS-8 Pa (SbfI) in a 10 μL ligation mixture containing 1 μL 10× T4 DNA ligase buffer and 1 μL T4 DNA ligase (400 U/μL), which was incubated for more than 8 hours at 16° C. 5.0 μL of ligation mixture was transformed into 50 μL Top10 competent cells. The pNOV6901-OsMADS-8P recombinants were verified by digesting 7.5 μL pNOV6901-OsMADS-8P miniprep DNA with 0.5 μL SbfI, 0.5 μL NcoI in 10 μL reaction mixtures containing 1 μg BSA and 1 μL 10× restriction endonuclease buffer. The digests were incubated at 37° C. for 2 hours then resolved on 1% TAE agarose. Positive pNOV6901-OsMADS-8P recombinants were sequenced.

[0191] D. Construction of the OsMADS8 3′-Regulatory Sequence

[0192] The OsMADS-8 3′-regulatory sequence for the expression cassette, about 2.1 kb, was produced by high-fidelity PCR from the pCR-Blunt-II-OsMADS8-3′-gDNA clone, above. The reaction mixture consisted of 1 μL pCR-Blunt-II-OsMADS8-3′-gDNA miniprep DNA, 200 μM dNTP mixture, 20 μM oligonucleotide primer OsMADS8-C2 5′-acgtcccgggcggaccgagtcatcgatcatgac-3′ (SEQ ID NO 488), 20 μM oligonucleotide primer OsMADS8-C4 5′-tcgagcggccgcaggccgatgcgacaaccaataaaaac-3′ (SEQ ID NO 489), 5 μL 10× cloned Pfu buffer and 2.5 Units of Pfuturbo DNA polymerase (Stratagene, Cat. No. 600252) in a final volume of 50 μL. The thermocycling program was 95° C. for 30 seconds then 40 cycles of (95° C. for 10 seconds, 50° C. for 60 seconds, 72° C. for 6 minutes) then 72° C. for 10 minutes. The OsMADS-8T DNA product was recovered using the QIAquick PCR purification kit. The recovered OsMADS-8T DNA was ethanol precipitated with glycogen carrier. The OsMADS-8T DNA was recovered by micro centrifugation, washed with 70% ethanol, dried under vacuum and resuspended in 14 μL ddH₂O. The OsMADS-8T DNA was digested in a 20 μL reaction mixture containing 2 μg BSA, 2 μL 10× restriction endonuclease buffer, 1 μL NotI and 1 μL XmaI. The digest was incubated at 37° C. for more than 6 hours. The OsMADS-8T (NotI/XmaI) DNA was resolved on 1.0% TAE agarose, excised, recovered and ethanol precipitated with glycogen carrier. The OsMADS-8T (NotI/XmaI) DNA was recovered by micro centrifugation, washed with 70% ethanol, dried under vacuum and resuspended in 5 μL ddH₂O.

[0193] 2 μg pNOV6901-OsMADS-8P miniprep DNA was digested in a 20 μL reaction mixture containing 2 μg BSA, 2 μL 10× restriction endonuclease buffer, 1 μL NotI and 1 μL XmaI. The digest was incubated at 37° C. for more than 6 hours, then at 70° C. for 20 minutes. Then 1 μL of the appropriate 10× restriction endonuclease buffer, 1 μL 1 Unit/μL CIP and 8 μL ddH₂O were added to the reaction and it was further incubated at 37° C. for 30 minutes. The pNOV6901-OsMADS-8P (NotI/XmaI/CIP) plasmid DNA was resolved on 1.0% TAE agarose and the 9.9 kb pNOV6901-OsMADS-8P band was excised, recovered and ethanol precipitated with glycogen carrier. The pNOV6901-OsMADS-8P (NotI/XmaI/CIP) DNA fragment was recovered by micro centrifugation, washed with 70% ethanol, dried under vacuum and resuspended in 5 μL ddH₂O.

[0194] 4.0 μL of the pNOV6901-OsMADS-8P (NotI/XmaI/CIP) was ligated to 4.0 μL OsMADS-8T (NotI/XmaI) in a 10 μL ligation mixture containing 1 μL 10× T4 DNA ligase buffer and 1 μL T4 DNA ligase (400 Units/μL), which was incubated more than 8 hours at 16° C. 5.0 μL of ligation mixture was transformed into 50 μL Top10 competent cells. pNOV6901-OsMADS-8P/OsMADS-8T recombinants were verified by digesting 2 μL pNOV6901-OsMADS-8P/OsMADS-8T miniprep DNA with 1.0 μL RsrII in 10 μL reaction mixtures containing 1 μg BSA and 1 μL 10× restriction endonuclease buffer. The digests were incubated at 37° C. for 2 hours then resolved on 1% TAE agarose. Positive pNOV6901-OsMADS-8P/OsMADS-8T recombinants were sequenced. The finished clone was designated pNOV6901-OsMADS-8P/OsMADS-8T. The plasmid's QC number is 11170. 11170 contains the complete OSMADS8 expression cassette depicted by SEQ ID NO. 538.

[0195] E. Mobilization of the OsMADS8 GUS Expression Cassette into pNOV6900

[0196] 2 μg pNOV6900 was digested in a 20 μL reaction mixture containing 2 μg BSA, 2 μL 10× restriction endonuclease buffer and 2 μL RsrII. The digest was incubated at 37° C. for more than 6 hours, then at 70° C. for 20 minutes. Then 1 μL of the appropriate 10× restriction endonuclease buffer, 1 μL 1 Unit/μL CIP and 8 μL ddH₂O were added to the reaction and it was further incubated at 37° C. for 30 minutes. 2 μg pNOV6901-OsMADS-8P/OsMADS-8T miniprep DNA was digested in a 20 μL reaction mixture containing 2 μg BSA, 2 μL 10× restriction endonuclease buffer and 2 μL RsrII. The digest was incubated the reaction at 37° C. for more than 6 hours.

[0197] The digested plasmid DNAs, pNOV6900 (RsrICIP) and pNOV6901-OsMADS-8P/OsMADS-8T (RsrII), were resolved on 1.0% TAE agarose and the 9.2 kb pNOV6900 (RsrII/CIP) and the 9.5 kb pNOV6901-OsMADS-8P/OsMADS-8T (RsrII) bands were excised, recovered and ethanol precipitated with glycogen carrier. The pNOV6900 (RsrII/CIP) and the pNOV6901-OsMADS-8P/OsMADS-8T (RsrII) DNA fragments were recovered by micro centrifugation, washed with 70% ethanol, dried under vacuum and each resuspended in 5 μL ddH₂O.

[0198] 4.0 μL of pNOV6900 (RsrII/CIP) was ligated to 4.0 μL pNOV6901-OsMADS-8P/OsMADS-8T (RsrII) in a 10 μL ligation mixture containing 1 μL 10× T4 DNA ligase buffer and 1 μL T4 DNA ligase (400 U/μL). The ligation mixture was incubated more than 8 hours at 16° C. 5.0 μL of ligation mixture was transformed into 50 μL Top10 competent cells. The pNOV6900-pNOV6901-OsMADS-8P/OsMADS-8T recombinants were verified by digesting 7.5 μL pNOV6900-pNOV6901-OsMADS-8P/OsMADS-8T miniprep DNA with 1.0 μL NcoI in 10 μL reaction mixtures containing 1 μg BSA and 1 μL 10× restriction endonuclease buffer. The digests were incubated at 37° C. for 2 hours then resolved on 1% TAE agarose. Positive pNOV6900-pNOV6901-OsMADS-8P/OsMADS-8T recombinants were sequenced. The finished clone was designated pNOV6909. The plasmid's QC number is 11171.

[0199] The engineered alterations in the 5′-regulatory sequence derived from the OsMADS8 gene include introduction of an SbfI site followed by an RsrII site at the 5′-end of OsMADS8P, elimination of the natural translation start codon in OsMADS8P, elimination of undesired open reading frames in the new 5′-untranslated leader sequence transcribed from OsMADS8P, insertion of a Kozak sequence upstream of the new translation start codon in OsMADS8P and insertion of the new translation start codon downstream of the intron1/exon2 junction in OsMADS8P as an NcoI site. The engineered alterations in the 3′-gene regulatory sequence derived from the OsMADS8 gene include introduction of a NotI site at the 5′-terminus of OsMADS8T and introduction of an RsrII site at the 3′-terminus of OsMADS8T. In this configuration the GUS coding sequence can be replaced with any gene of interest flanked by NcoI/NotI restriction sites. The complete cassette is mobilized, as an RsrII fragment, to the binary vector pNOV6900.

[0200] The cassette was transformed into A188 X HyII maize and Kaybonnet rice using standard agrobacterium mediated methodology.

[0201] GUS Expression in T0 Maize

[0202] Forty T0 transgenic maize lines were generated. Tassel spikelets were histochemically screened for GUS activity. Twenty-nine events were positive for GUS activity. Thirteen also showed GUS expression in leaf punches. In general, the pattern revealed detectable GUS activity in tassels and little of no activity in leaf punches. The ear from one plant reflecting this pattern was sacrificed to examine GUS expression. Strong GUS expression is evident throughout the ear. These data indicate the cassette drives GUS expression primarily in female reproductive tissue.

[0203] GUS Expression in T0 Rice

[0204] Of thirty-six T0 rice lines containing pNOV6909, thirty-two independent transformants were histochemically stained for GUS expression. No GUS activity was detected in leaf tissue. In most events, activity localized to panicles and could be seen in anthers or the carpel base. Staining intensity varied significantly.

[0205] GUS Expression in T1 Maize

[0206] T1 progeny from four independent transformants were sown and analyzed in detail for GUS expression. FIGS. 14A-14D show there was no detectable GUS expression in tassels, leaf tissue, developing silk or shoots. This indicates tassel and leaf expression observed in T0 plants may result from tissue culture associated with the transformation process. Dissected organs from T1 tassels indicated no apparent GUS expression (data not shown). FIG. 14D shows no GUS activity in the node attached to the developing ear shoot. The node below this also has no detectable GUS activity, but there is distinct activity in florets on the arrested ear (FIG. 14E). The expression cassette is activated very early in floret development. FIGS. 14F, 14G, 15A and 15B show GUS activity in the central pith and florets of the developing ear before pollination. This pattern persists from 5 days before pollination to one day before pollination. Central pith expression persists up to 1 day before pollination, after which GUS activity is no longer detected in this zone (FIGS. 15 and 16). FIGS. 15D-15G indicate some GUS activity in the ear's outer vasculature and the floret's transmitting tissue from the day of pollination to 1 day after pollination. Afterwards, GUS activity is detected only in the maternal components of developing kernels. Data shown in FIGS. 15 and 16 cover development from 1 day before pollination to 20 days after pollination. GUS protein is detectable throughout ovule and kernel development, up to 20 days after pollination. These data support the OsMADS8 cassette as a very good candidate for trait expression in developing florets. When driven by the OsMADS8-based expression cassette, genes that facilitate phloem unloading such as invertase or a sucrose transporter should prove effective in supporting early ear development by increasing sink strength. FIG. 25C shows very light staining in the aerial tissue, with no GUS activity in the roots

[0207] In summary, the present invention includes expression cassettes based on the Oryza sativa OsMADS8 gene. It consists of the gene's promoter including the first intron, 5′-UTR, 3′-UTR and 3′-nontranscribed sequence. The cassette's design facilitates replacement of the GUS coding sequence with any gene of interest. The cassette targets gene expression primarily to developing florets and kernels, and the placental tissue beneath each floret. Post-fertilization, expression is detected in the aleurone, hilar region and pedicel. Developmentally, the cassette should drive gene expression from a very early point in ovule development, perhaps from shortly after differentiation.

### EXAMPLE 6

### Construction of the OsMADS13 Expression Cassette

[0208] A. Cloning of the OsMADS13 5′-Regulatory Sequence

[0209] The OsMADS13 5′-regulatory sequence from rice genomic DNA (gDNA) was amplified using high-fidelity PCR. The 50 μL reaction mixture consisted of 100 ng rice gDNA, 200 μM dNTPs, 1 μL 20 μM oligonucleotide primer OsMADS13-C1 5′-gactgcatgcggaccgttccaaaattaagcacacacatttg-3′ (SEQ ID NO 490), 1 μL 20 μM oligonucleotide primer OsMADS13-C2 5′-gactccatggcttcttgctctcaactgatcaac-3′ (SEQ ID NO 491), 1 μL 10× Expand High Fidelity buffer and 1 μL Expand High Fidelity polymerase. The thermocycling program was at 95° C. for 2 minutes followed by 40 cycles of (94° C. for 15 seconds, 68° C. for 7.5 minutes) followed by 68° C. for 10 minutes. The 1.9 kb OsMADS13-5′-gDNA DNA fragment was recovered and ethanol precipitated with glycogen carrier. The OsMADS13-5′-gDNA fragment was recovered by micro centrifugation, washed with 70% ethanol, dried under vacuum and resuspended in 14 μL ddH₂O. The OsMADS13-5′-gDNA fragment was digested in a 20 μL reaction mixture containing 2 μg BSA, 2 μL 10× restriction endonuclease buffer and 2 μL NcoI. The digest was incubated at 37° C. for more than 6 hours. The digest was resolved on 1.0% TAE agarose and the 1.9 kb OsMADS13-5′-gDNA (NcoI) DNA band was excised, recovered and ethanol precipitated with glycogen carrier. The OsMADS13-5′-gDNA (NcoI) DNA as recovered by micro centrifugation, washed with 70% ethanol, dried under vacuum and resuspended in 5 μL ddH₂O.

[0210] 2 μg pNOV6901 miniprep DNA was digested in a 20 μL reaction mixture containing 2 μg BSA, 2 μL 10× restriction endonuclease buffer and 2 μL SphI. The digest was incubated at 37° C. for more than 6 hours, then at 70° C. for 20 minutes. Then 1 μL of the appropriate 10× restriction endonuclease buffer, 1 μL 1 Unit/μL CIP and 8 μL ddH₂O were added to the reaction and it was further incubated at 37° C. for 30 minutes. The pNOV6901 (SphI/blunt) DNA was resolved on 1.0% TAE agarose and the 4.7 kb pNOV6901 (SphI/blunt) band was excised, recovered and ethanol precipitated with glycogen carrier. The pNOV6901 (SphI/blunt) DNA was recovered by micro centrifugation, washed with 70% ethanol, dried under vacuum and resuspended in 14 μL ddH₂O.

[0211] pNOV6901 (SphI/blunt) miniprep DNA was digested in a 20 μL reaction mixture containing 2 μg BSA, 2 μL 10× restriction endonuclease buffer and 2 μL NcoI. The digest was incubated at 37° C. for more than 6 hours. The pNOV6901 (SphI/blunt/NcoI) plasmid DNA was resolved on 1.0% TAE agarose and the 4.7 kb pNOV6901 (SphI/blunt/NcoI) band was excised, recovered and ethanol precipitated with glycogen carrier. The pNOV6901 (SphI/blunt/NcoI) DNA was recovered by micro centrifugation, washed with 70% ethanol, dried under vacuum and resuspended in 5 μL ddH₂O.

[0212] 4.0 μL OsMADS13-5′-gDNA (NcoI) was ligated to 4.0 μL pNOV6901 (SphI/blunt/NcoI) in a 10 μL ligation mixture containing 1 μL 10× T4 DNA ligase buffer and 1 μL T4 DNA ligase (400 Units/μL). The ligation mixture was incubated more than 8 hours at 16° C. 5.0 μL of the ligation mixture was transformed into 50 μL Top10 competent cells. The pNOV6901-OsMADS13P recombinants were verified by digesting 2 μL pNOV6901-OsMADS13P miniprep DNA with 0.5 μL XhoI, 0.5 μL NcoI in 10 μL reaction mixtures containing 1 μg BSA and 1 μL 10× restriction endonuclease buffer. The digests were incubated at 37° C. for 2 hours then resolved on 1% TAE agarose. Positive pNOV6901-OsMADS13P recombinants were sequenced.

[0213] B. Cloning of the OsMADS13 3′-Regulatory Sequence

[0214] The OsMADS13 3′-regulatory sequence from rice genomic DNA (gDNA) was amplified using high-fidelity PCR. The 50 μL reaction mixture consisted of 100 ng rice gDNA, 200 μM dNTPs, 1 μL 20 μM oligonucleotide primer OsMADS13-C3 5′-tcgagcggccgctgacatggatatgatgatcag-3′ (SEQ ID NO 492), 1 μL 20 μM oligonucleotide primer OsMADS13-C4 5′-acgtatcgatcggaccgcaacgcacgggcacccaac-3′ (SEQ ID NO 493), 1 μL 10× Expand High Fidelity buffer and 1 μL Expand High Fidelity polymerase. The thermocycling program was at 95° C. for 2 minutes followed by 40 cycles of (94° C. for 15 seconds, 60° C. for 30 seconds, 68° C. for 6 minutes) followed by 68° C. for 15 minutes. The 1.2 kb OsMADS13-3′-gDNA DNA fragment was recovered and ethanol precipitated with glycogen carrier. The OsMADS13-3′-gDNA DNA fragment was recovered by micro centrifugation, washed with 70% ethanol, dried under vacuum and resuspended in 14 μL ddH₂O.

[0215] The OsMADS13-3′-gDNA fragment was digested in a 20 μL reaction mixture containing 2 μg BSA, 2 μL 10× restriction endonuclease buffer and 2 μL NotI. The digest was incubated at 37° C. for more than 6 hours then resolved on 1.0% TAE agarose and the 1.2 kb OsMADS13-3′-gDNA (NotI) DNA band was excised, recovered and ethanol precipitated with glycogen carrier. The OsMADS13-3′-gDNA (NotI) DNA was recovered by micro centrifugation, washed with 70% ethanol, dried under vacuum and resuspended in 5 μL ddH₂O.

[0216] 2 μg pNOV6901-OsMADS13P miniprep DNA was digested in a 20 μL reaction mixture containing 2 μg BSA, 2 μL 10× restriction endonuclease buffer, 1 μL NotI and 1 μL SmaI. The digest was incubated at 37° C. for more than 6 hours, then at 70° C. for 20 minutes. Then 1 μL of the appropriate 10× restriction endonuclease buffer, 1 μL 1 Unit/μL CIP and 8 μL ddH₂O were added to the reaction and it was further incubated at 37° C. for 30 minutes. The pNOV6901-OsMADS13P (NotI/SmaI/CIP) DNA was resolved on 1.0% TAE agarose and the 6.6 kb band was excised, recovered and ethanol precipitated with glycogen carrier. The pNOV6901-OsMADS13P (NotI/SmaI/CIP) DNA fragment was recovered by micro centrifugation, washed with 70% ethanol, dried under vacuum and resuspended each in 5 μL ddH₂O.

[0217] 4.0 μL pNOV6901-OsMADS13P (NotI/SmaI/CIP) was ligated to 4.0 μL OsMADS13-3′-gDNA (NotI) in a 10 μL ligation mixture containing 1 μL 10× T4 DNA ligase buffer and 1 μL T4 DNA ligase (400 Units/μL). The ligation mixture was incubated more than 8 hours at 16° C. 5.0 μL of the ligation mixture was transformed into 50 μL Top10 competent cells. The pNOV6901-OsMADS13P/OsMADS13T recombinants were verified by digesting 7.5 μL pNOV6901-OsMADS13P/OsMADS13T miniprep DNA with 1.0 μL NotI in 10 μL reaction mixtures containing 1 μg BSA and 1 μL 10× restriction endonuclease buffer. Digests were incubated at 37° C. for 2 hours then resolved on 1% TAE agarose. Positive pNOV6901-OsMADS13P/OsMADS13T recombinants were sequenced. The finished clone was designated pNOV6904, which is also the plasmid's QC number. pNOV6904 contains the complete OSMAD13 expression cassette depicted by SEQ ID NO. 539.

[0218] C. Mobilization of the OsMADS13 GUS Expression Cassette into pNOV6900

[0219] 2 μg pNOV6900 was digested in a 20 μL reaction mixture containing 2 μg BSA, 2 μL 10× restriction endonuclease buffer and 2 μL RsrII. The digest was incubated at 37° C. for more than 6 hours, then at 70° C. for 20 minutes. Then 1 μL of the appropriate 10× restriction endonuclease buffer, 1 μL 1 Unit/μL CIP and 8 μL ddH₂O were added to the reaction and it was further incubated at 37° C. for 30 minutes. 2 μg pNOV6901-OsMADS13P/OsMADS13T miniprep DNA was digested in a 20 μL reaction mixture containing 2 μg BSA, 2 μL 10× restriction endonuclease buffer and 2 μL RsrII. The digest was incubated the reaction at 37° C. for more than 6 hours.

[0220] The digested plasmid DNAs, pNOV6900 (RsrII/CIP) and pNOV6901-OsMADS13P/OsMADS13T (RsrII), were resolved on 1.0% TAE agarose and the 9.2 kb pNOV6900 (RsrII/CIP) and the 5.3 kb pNOV6901-OsMADS13P/OsMADS13T (RsrII) bands were excised, recovered and ethanol precipitated with glycogen carrier. The pNOV6900 (RsrII/CIP) and pNOV6901-OsMADS13P/OsMADS13T (RsrII) DNA fragments were recovered by micro centrifugation, washed with 70% ethanol, dried under vacuum and resuspended each in 5 μL ddH₂O.

[0221] 4.0 μL of pNOV6900 (RsrII/CIP) was ligated to 4.0 μL pNOV6901-OsMADS13P/OsMADS13T (RsrII) in a 10 μL ligation mixture containing 1 μL 10× T4 DNA ligase buffer and 1 μL T4 DNA ligase (400 U/μL). The ligation mixture was incubated more than 8 hours at 16° C. 5.0 μL of ligation mixture was transformed into 50 μL Top10 competent cells. The pNOV6900-pNOV6901-OsMADS13P/OsMADS13T recombinants were verified by digesting 7.5 μL pNOV6900-pNOV6901-OsMADS13P/OsMADS13T miniprep DNA with 1.0 μL NcoI in 10 μL reaction mixtures containing 1 μg BSA and 1 μL 10× restriction endonuclease buffer. The digests were incubated at 37° C. for 2 hours then resolved on 1% TAE agarose. Positive pNOV6900-pNOV6901-OsMADS13P/OsMADS13T recombinants were sequenced. The finished clone was designated pNOV6905, which is also the plasmid's QC number.

[0222] The engineered alterations in the 5′-gene regulatory sequence derived from the OsMADS13 gene include introduction of an RsrII site at the 5′-end of OsMADS13P, insertion of a Kozak sequence upstream of the natural OsMADS13P translation start codon and modification of the natural OsMADS13P translation start codon so that it is contained within an NcoI site. The engineered alterations in the 3′-gene regulatory sequence derived from the OsMADS13 gene include introduction of a NotI site at the 5′-terminus of OsMADS13T and introduction of an RsrII site at the 3′-terminus of OsMADS13T. In this configuration the GUS coding sequence can be replaced with any gene of interest flanked by NcoI/NotI restriction sites. The complete cassette is mobilized, as an RsrII fragment, to the binary vector pNOV6900.

[0223] The cassette was transformed into A188 X HyII maize and Kaybonnet rice using standard agrobacterium mediated methodology.

[0224] GUS Expression in T0 Maize

[0225] Sixty-seven T0 transgenic maize lines were generated. Tassel spikelets were histochemically screened for GUS expression. Fifty-six were positive for GUS activity. Thirty-five also showed GUS expression in leaf punches. Ten lines had no detectable GUS activity in tassels or leaf punches.

[0226] Two T0 lines were selected to analyze GUS expression in developing ears. Both lines had a GUS signal in tassel spikelets and no GUS signal in leaf punches. Ears were harvested approximately 7 days before silking and histochemically stained for GUS expression. Whole sections showed a strong GUS signal only in developing florets, whereas GUS activity is absent in surrounding ear tissue. These data indicate the OsMADS13 expression cassette functions to drive GUS expression in both male and female spikelets in T0 maize transformants.

[0227] GUS Expression in T0 Rice

[0228] Thirty-three T0 rice lines were produced. Fourteen independent transformants were histochemically stained for GUS expression GUS activity was primarily detected in spikelets. Some plants also had GUS activity in leaf tissue.

[0229] GUS Expression in T1 Maize

[0230] T1 progeny from three independent transformants were sown and analyzed in detail for GUS expression. FIGS. 20A-20C and FIGS. 21A-21C show there was no detectable GUS expression in leaf tissue, developing silk or tassels. This indicates tassel expression observed in T0 plants may result from tissue culture associated with the transformation process. Dissected organs from T1 tassels indicated no apparent GUS expression (data not shown). FIGS. 20D and 20E show GUS activity in the developing ear harvested about 5 days before pollination. The longitudinal section showed expression localized to developing ovules and transmitting or placental tissue. The cross section supports this and provides further evidence for expression in ear vasculature. FIG. 21 summarizes observed GUS expression in a second transgenic event. It also localizes to zones where ovules will likely develop. FIG. 22 demonstrates expression localizes to vasculature supplying the developing ear.

[0231] These data support the OsMADS13 cassette as a very good candidate for trait expression in developing ovules. When driven by the OsMADS13-based expression cassette, genes that facilitate phloem unloading such as invertase or a sucrose transporter should prove effective in supporting early ear development by increasing sink strength.

[0232] FIGS. 23 and 24 demonstrate the cassette continues to function post-fertilization. The observed GUS expression pattern at 4 and 6 days after pollination (FIG. 23). Late in kernel development (21 days after pollination) GUS expression remains localized to the pedicel and hilar regions (FIG. 24). It also appears in the aleurone. GUS protein is detectable throughout ovule and kernel development, up to 21 days after pollination. FIG. 25D shows very light staining in the aerial tissue, with no GUS activity in the roots.

[0233] The present invention includes an expression cassette based on the Oryza sativa OsMADS13 gene. The expression cassette includes the gene's promoter, including the first intron and the 5′-UTR, the 3′-UTR and the 3′-nontranscribed sequence. These components were assembled into a GUS expression cassette and tested in transgenic plants. The cassette's design facilitates replacement of the GUS coding sequence with any gene of interest. The cassette will target gene expression to the vasculature within the placental tissue below the floret of developing ear spikelets. Post-fertilization, expression is also expected in the aleurone, hilar region and pedicel. Developmentally, the cassette should drive gene expression from a very early point, more than 7 days before pollination, in ovule development.

### EXAMPLE 7

### Identification of the OsT6PP cDNA Sequence

[0234] The first vascular plant trehalose-6-phosphate phosphatase genes were cloned from Arabidopsis thaliana by complementation of a yeast tps2 deletion mutant (Vogel et al. 1998). The genes designated AtTPPA and AtTPPB (GenBank accessions AF007778 and AF007779) were shown at that time to have trehalose-6-phosphate phosphatase activity. The AtTPPA and AtTTPB protein sequences were used in TBLASTN queries of maize and rice sequence databases. Sequence alignments organized the hits into individual genes. Three maize and three rice T6PP homologs were identified. The cDNA sequences corresponding to the predicted protein sequence for each gene—ZmT6PP-1, -2 and -3 and OsT6PP-1, -2 and -3—are shown in global alignment with the Arabidopsis T6PPs in FIG. 26.

[0235] The composition and method of the present invention includes using the OsMADS6 promoter operably linked to a nucleic acid molecule that when expressed in a plant cell, increases the expression of T6PP. By doing so, flux through the trehalose pathway is increased only in young developing ears where it functions to increase flux through central carbon metabolism.

[0236] The OsT6PP-3 cDNA sequence (SEQ ID NO. 531) is amplified using high-fidelity PCR. The 50 μL reaction mixture consists of 1 μL rice cDNA library (prepared from callus mRNA in Stratagene's Lambda Unizap Vector, primary library size>1×10⁶ pfu, amplified library titer>1×10¹² pfu/mL), 200 μM dNTPs, 1 μL 20 μM of oligonucleotide primer T6PP-EC-5 (5′-catggaccatggatttgagcaatagctcac-3′) SEQ ID NO. 528 and 1 μL 20 μM of oligonucleotide primer T6PP-EC-3 (5′-atcgcagagctcacactgagtgcttcttcc-3′) SEQ ID NO. 529, 5 μL 10× Cloned PFU buffer and 2.5 Units of Pfuturbo DNA polymerase. The thermocycling program is 95° C. for 2 minutes followed by 40 cycles of (94° C. for 15 seconds, 50° C. for 1 minute, 72° C. for 1 minute) followed by 72° C. for 10 minutes. The OsT6PP-3 product is cloned with the Zero Blunt TOPO PCR cloning kit. The pCR-Blunt-II-TOPO-OsT6PP-3 is identified by digesting 5 μL pCR-Blunt-II-TOPO-OsT6PP-3 miniprep DNA with EcoRI in a 20 μL reaction containing 2 μg BSA and 2 μL 10× EcoRI restriction endonuclease buffer. The reaction is incubated at 37° C. for 2 hours and the pCR-Blunt-II-TOPO-OsT6PP-3 (EcoRI) products are resolved on 1% TAE agarose. The pCR-Blunt-II-TOPO-OsT6PP-3 clone is then sequenced. The OsT6PP-3 cDNA is flanked by NcoI/SacI restriction endonuclease sites.

[0237] To facilitate cloning into 11082, an internal NcoI site in OsT6PP was silenced using Stratagene's QuikChange Multi Site-Directed Mutagenesis Kit and the oligonucleotide primer T6PP-QC (5′-CTTT ATTATGCTGGAAGTCATGGTATGGACATAATGGCACC-3′) SEQ ID NO. 530.

### EXAMPLE 8

### Construction of OsMADS6-T6PP

[0238] A. Construction of the OsMADS6-OsT6PP-3 Expression Cassette

[0239] The pCR-Blunt-II-TOPO-OsT6PP-3 clone (14 μL) DNA was digested in a 20 μL reaction mixture containing 2 μg BSA, 2 μL 10× restriction endonuclease buffer, 1 μL NcoI and 1 μL SacI. The digest was incubated at 37° C. for more than 6 hours. The pCR-Blunt-II-TOPO-OsT6PP-3 (NcoVSacI) DNA was resolved on 1.0% TAE agarose and the 1.3 kb OsT6PP-3 (NcoI/SacI) band was excised, recovered and ethanol precipitated with glycogen carrier. The OsT6PP-3 (NcoI/SacI) DNA was recovered by micro centrifugation, washed with 70% ethanol, dried under vacuum and resuspended in 5 μL ddH₂O.

[0240] 2 μg 11082 miniprep DNA was digested in a 20 μL reaction mixture containing 2 μg BSA, 2 μL 10× restriction endonuclease buffer, 1 μL NcoI and 1 μL SacI. The digest was incubated at 37° C. for more than 6 hours, then at 70° C. for 20 minutes. Then 1 μL of the appropriate 10× restriction endonuclease buffer, 1 μL 1 Unit/μL CIP and 8 μL ddH₂O were added to the reaction and it was further incubated at 37° C. for 30 minutes. The 11082 (NcoI/SacI/CIP) DNA was resolved on 1.0% TAE agarose and the 8.1 kb 11082 (NcoI/SacI/CIP) band was excised, recovered and ethanol precipitated with glycogen carrier. The 11082 (NcoI/SacI/CIP) DNA fragment was recovered by micro centrifugation, washed with 70% ethanol, dried under vacuum and resuspended in 5 μL ddH₂O.

[0241] 4.0 μL 11082 (NcoI/SacI/CIP) was ligated to 4.0 μL OsT6PP-3 (NcoI/SacI) in a 10 μL reaction mixture containing 1 μL 10× T4 DNA ligase buffer and 1 μL T4 DNA ligase (400 Units/μL). The reaction mixture was incubated more than 8 hours at 16° C. 5.0 μL of ligation mixture was transformed into 50 μL Top10 competent cells. The recombinants were verified by digesting 7.5 μL 11082-OsT6PP-3 miniprep DNA with 1.0 μL RsrII in 10 μL reaction mixtures containing 1 μg BSA and 1 μL 10× restriction endonuclease buffer. The digests were incubated at 37° C. for 2 hours then resolved on 1% TAE agarose. Positive 11082-OsT6PP-3 recombinants were sequenced. The vector was designated OsMADS6-OsT6PP-Assembly and is shown in FIG. 27A.

[0242] B. Mobilization of the OsMADS6-OsT6PP-Assembly Expression Cassette into pNOV6900

[0243] 2 μg pNOV6900 was digested in a 20 μL reaction mixture containing 2 μg BSA, 2 μL 10× restriction endonuclease buffer and 2 μL RsrII. The digest was incubated at 37° C. for more than 6 hours, then at 70° C. for 20 minutes. Then 1 μL of the appropriate 10× restriction endonuclease buffer, 1 μL 1 Unit/μL CIP and 8 μL ddH₂O were added to the reaction and it was further incubated at 37° C. for 30 minutes. 2 μg pNOV6906-OsT6PP-Assembly miniprep DNA was digested in a 20 μL reaction mixture containing 2 μg BSA, 2 μL 10× restriction endonuclease buffer and 2 μL RsrII. The digest was incubated at 37° C. for more than 6 hours.

[0244] The pNOV6900 (RsrII/CIP) and the pNOV6906-OsT6PP-Assembly (RsrII) plasmid DNAs were resolved on 1.0% TAE agarose, and the 9.2 kb pNOV6900 (RsrII/CIP) and the 6.8 kb pNOV6906-OsT6PP-Assembly (RsrII) bands were excised, recovered and ethanol precipitated with glycogen carrier. The pNOV6900 (RsrII/CIP) and pNOV6906-OsT6PP-Assembly (RsrII) DNA fragments were recovered by micro centrifugation, washed with 70% ethanol, dried under vacuum and resuspended in 5 μL ddH₂O each.

[0245] 4.0 μL pNOV6900 (RsrII/CIP) was ligated to 4.0 μL pNOV6906-OsT6PP-Assembly (RsrII) in a 10 μL ligation mixture containing 1 μL 10× T4 DNA ligase buffer and 1 μL T4 DNA ligase (400 U/μL). The ligation mixture was incubated more than 8 hours at 16° C. 5.0 μL of ligation mixture was transformed into 50 μL Top10 competent cells. The pNOV6900-pNOV6906-OsT6PP-Assembly recombinants were verified by digesting 7.5 μL miniprep DNA with 1.0 μL NcoI in 10 μL reaction mixtures containing 1 μg BSA and 1 μL 10× restriction endonuclease buffer. The digests were incubated at 37° C. for 2 hours then resolved on 1% TAE agarose. Positive pNOV6900-pNOV6906-OsT6PP-Assembly recombinants were sequenced. The finished clone was designated OsMADS6-OsT6PP-Binary and is shown in FIG. 27B. The plasmid's QC number is 12194.

[0246] The OsMADS6-OsT6PP-3 expression cassette (SEQ ID NO. 533) was transformed into A188 maize using standard agrobacterium mediated methodology. Regenerated TO shoots were screened transgene copy number and insert integrity using a Taqman™ assay. Events containing a single copy of the OsMADS6-OsT6PP-3 expression cassette and no other sequence derived from the binary vector were identified.

[0247] Expression cassette function in each transgenic Event was verified by RT-PCR. DNA-free total RNA template was prepared from 100 mg of T0 tassel tissue using the RNeasy Plant mini Kit. The RT-PCR assay was performed using the Qiagen One Step RT-PCR kit with 100 ng total RNA template, the T6PP-RTPCRF (5′-gacagaactgacgaagacgctttcaa-3′) and 6906-tr (5′-ctccaacttctgacagctg-3′) primers (SEQ ID NOS. 534, 535 respectively). This assay produces a transgene-specific 210 bp fragment.

### EXAMPLE 9

### Greenhouse Growth Conditions

[0248] Corn seed is sown into 2.5 SVD pots (Classic 600, ˜2 gallon nursery containers) in Universal mix (Sungrow Horticulture, Pine Bluff, Ark.). Universal mix is 45% Peat moss, 45% bark, 5% perlite, 5% vermiculite. Environmental conditions for greenhouse maize cultivation are typically 16 hour days (average light intensity 600 μmol m⁻²s⁻²), day time temperature of 80-86° F., night time temperature 70-76° F. and relative humidity greater than 50%. Plants are placed on 2″ platforms to avoid contact with the greenhouse floor. Plants are hand watered until daily irrigation as required, then they are placed on irrigation drip. The irrigation schedule is 4 minutes every other day. Plants were routinely treated with insecticides to control pests.

### EXAMPLE 10

### Evaluation of Transgenic Maize Expressing OsMADS6-OsT6PP-3 in the Greenhouse

[0249] The greenhouse evaluation is a controlled water-stress experiment that quantifies ovule viability in water-stressed and unstressed plants. Data from unstressed plants represent the genotype's potential to set seed under ideal conditions. Data from water-stressed plants quantify kernel abortion that results from drought at the time of flowering. The results of these experiments can be predictive of field performance. We used this tool to select transgenic events for field evaluations.

[0250] Transgenic maize segregating for a single copy of the OsMADS6-T6PP-3 transgene were sown as above. Taqman analysis was used to divide the progeny into homozygous or hemizygous (containing OsMADS6-OsT6PP-3) and azygous (lost the OsMADS6-OsT6PP-3) groups. These individuals were pollinated with JHAF031 maize pollen to generate hybrid seed (KPOO188RA×JHAF031) for the greenhouse experiment. The hybrid seed were sown as above. Seedlings were transferred to 600 pots, above, and maintained using standard greenhouse procedures until they reached the V6 growth stage (Ritchie et al., 1997). All plants were treated with the systemic pesticide, Marathon, to reduce susceptibility to pests. Water stress was gradually imposed, using salt as the osmoticum (Nuccio et al. 1998). The salt consisted of sodium chloride/calcium chloride at a 10:1 molar ratio, delivered in 0.5× Hoagland's Solution, to prevent sodium-induced disruption of potassium uptake. Salt concentration in the irrigant was increased from 50 mM to 100 mM to 150 mM every three days to give plants time to adjust to the salt. Plants were maintained on 150 mM salt solution through the flowering period, typically two weeks, after which pots were thoroughly flushed with water and plants were returned to normal irrigation. This protocol typically reduced kernel set by 40-60%, compared to control plants that received no salt.

[0251] Typically 15-20 seed per transgenic event were sown to generate a uniform seedling population. Plants were arranged in a complete, randomized block design consisting of six-eight replicates per treatment. Developing ears were covered with pollination bags before silk emergence. Pollen shed and silk emergence dates were recorded and individual ears were hand pollinated with donor pollen 5 days after silk emergence. Pollination bags were removed after completing all pollinations. Ears were harvested 30 days after pollinations, and dried for 4 days to 15% moisture content. Ears were shelled and the kernels were counted and weighed.

### EXAMPLE 11

### Greenhouse Experiment

[0252] Two OsMADS6-T6PP-3 events were studied for their ability to set seed under water stress. Twenty-four hybrid seed (A188×JHAF031) from each event were germinated. Taqman analysis was used to establish zygosity in each seedling. Hemizygotes and azygotes were analyzed using the greenhouse water stress protocol described above. In this experiment azygote plants served as the benchmark. In these greenhouse experiments, the hemizygote plants could not be distinguished from the azygote plants. On average the water stress reduced kernel set by 42%. The data in these greenhouse experiments indicate the OsMADS6-T6PP-3 expression cassette does not influence kernel set in maize in these particular greenhouse experiments and when evaluated by the above water stress protocols.

### EXAMPLE 12

### Evaluation of Transgenic Maize Expressing OsMADS-T6PP-3 for Drought Stress tolerance in the Field

[0253] Hybrid seed were generated for each transgenic Event at the Syngenta Seeds field station in Kauai in late 2004. T1 seed obtained by selfing the T0 plant of the events was sown in four single-row plots, 12.7 feet long separated by 3 foot alleys with about 20 plants per row. Taqman analysis was used to divide the progeny into homozygous or hemizygous (containing OsMADS6-OsT6PP-3) and azygous (lost the OsMADS6-OsT6PP-3) groups. In two of the single-row plots, hemizygous and azygous plants were destroyed and homozygous plants were selfed for seed bulking and also testcrossed to NP2043BT11 and NP2044BT11. In the other two single-row plots homozygous and hemizygous plants were destroyed and azygous plants were selfed and also crossed to NP2043BT11 and NP2044BT11. The azygous and hemizygous testcross seed of the events was used to conduct field trials.

[0254] A field evaluation was conducted to test transgene performance in a controlled drought experiment. The experiment was conducted at the Syngenta Crop Protection Facility in Visalia, Calif. in the summer of 2004. The planting site typically gets less than 3″ of rainfall during the summer. The NP2043BT11 testcross seed, generated above, was used in this study. This population also contained the BT transgene to control insect pressure. A split-block design, with watering regime as the main plots arranged in a randomised complete blocks and replicated three times, events as the subplots, and in cases where there was seed of the azgous and hemizygous hybrids, genotype as sub-sub-plots was used. Two watering regimes were attempted: water-stressed and well-watered. Each plot consisted of two-rows, 17.5 feet long planted with 40 seeds per row. Alleys between ranges were 2.5 feet. Furrow irrigation was used to water the fields. Each treatment block had a dedicated irrigation source situated at one end of the field. The replication were arranged in such a way that replication one was closest to and replication three was the furthest from the irrigation source. After emergence, stand counts were taken and plots were thinned, as necessary, to establish field uniformity.

[0255] The well-watered block was thought to have been irrigated optimally throughout the experiment. The water-stress block was watered optimally until plants reached approximately V, at which time water was withheld. Plants were returned to optimal irrigation after 90% silk emergence.

[0256] After plants transitioned to reproductive development, the 50% pollen shed date, the 50% silk emergence date, and leaf scrolling at early-, mid- and late-flowering were recorded for each plot. Plot Barreness was recorded three weeks after silking.

[0257] Plots were combine-harvested and grain yield and grain moisture were recorded. The data from hemizygous plots were compared to azygous plots, or wild type plots where necessary, to gauge the transgene's effect on yield. Results for seven OsMADS6-T6PP-3 events are shown in FIG. 28. The data show the OsMADS6-T6PP-3 transgene has a positive effect on yield in four of the seven Events. The yield gain is evident in both unstressed and drought-stressed plots. For example in the drought-stressed treatment block the average yield for 5217 Events containing the transgene was 73 Bu/acre and the average yield for 5217 Events lacking the transgene was 54 Bu/acre. Results suggest the transgene improves kernel set by 25% in drought-stressed conditions. In the less stressed treatment block the average yield for 5217 Events containing the transgene was 132 Bu/acre and the average yield for 5217 Events lacking the transgene was 95 Bu/acre. Results suggest the transgene improves kernel set by nearly 28% in less stressed plants. The average yield calculated for each plot in the drought-stressed treatment block was 72 Bulacre. The average yield calculated for each plot in the less stressed treatment block was 113 Bu/acre. The yield improvement due to the OsMADS6-T6PP-3 gene varies from Event to Event. It is observed in four of the seven Events tested, and is manifest in both less stressed and drought-stressed plants. Results from this field experiment demonstrate the effectiveness of the OsMADS-T6PP-3 transgene in stabilizing kernel set in drought stressed maize.

### EXAMPLE 13

### Evaluation of Transgenic Maize Expressing OsMADS-T6PP-3 for Yield in the Field

[0258] Hybrid seed was generated for each transgenic Event at the Syngenta Seeds field station in Kauai in late 2004. T1 seed obtained by selfing the T0 plant of the events was sown in four single-row plots, 12.7 feet long separated by 3 foot alleys with about 20 plants per row. Taqman analysis was used to divide the progeny into homozygous or hemizygous (containing OsMADS6-OsT6PP-3) and azygous (lost the OsMADS6-OsT6PP-3) groups. In two of the single-row plots, hemizygous and azygous plants were destroyed and homozygous plants were selfed for seed bulking also testcrossed to NP2043BT11 and NP2044BT11. In the other two single-row plots homozygous and hemizygous plants were destroyed and azygous plants were selfed and also crossed to NP2043BT11 and NP2044BT11. The azygous and hemizygous testcross seed of the events was used to conduct field trials. A series of yield trials were conducted in several mid-West locations to test transgene performance under conditions typically used by growers. The XPOO188RA×NP2043BT11 material, generated above, was used in late maturity zones and the XPOO188RA×JHAF431B material, generated above, was used in early maturity zones. These populations also contained the BT transgene to control insect pressure. The experimental design consisted of randomised complete blocks with three replications. Each experimental unit consisted of two-row plots, 17.5 feet long planted with 34 kernels per row. Ranges were separated by 3 foot alleys. Events for which there was seed of both the azygous and the hemizygous hybrids, randomization was restricted to keep the azygous and hemizygous hybrids of the events in neighboring plots. Most Events were evaluated in eight to nine locations. Event 5124 was evaluated in three locations. After emergence, stand counts were taken and plots were thinned, as necessary, to establish field uniformity. During the growing season plots were evaluated for intactness, greensnap, root lodging, heat units to 50% pollen shed and heat units to 50% silking.

[0259] Plots were Combine-harvested and grain yield and grain moisture were recorded. The data from hemizygous plots were compared to azygous plots, or wild type plots where necessary, to gauge the transgene's effect on yield. The data shows that the OsMADS6-T6PP-3 transgene does not significantly affect yield in this experiment. There are two factors to consider. First the standard deviation for grain yield in this experiment was 15-20% of the mean. This is not unusual. Second, growth conditions in the mid-West were ideal for maize in 2004. Depending on location yields in this experiment averaged from 90 to 130 Bu/acre. Results from this field experiment indicate the OsMADS-T6PP-3 transgene did not cause yield drag.

### EXAMPLE 14

### Transformation

[0260] Once a nucleic acid sequence of the invention has been cloned into an expression system, it is transformed into a plant cell. The receptor and target expression cassettes of the present invention can be introduced into the plant cell in a number of art-recognized ways. Methods for regeneration of plants are also well known in the art. For example, Ti plasmid vectors have been utilized for the delivery of foreign DNA, as well as direct DNA uptake via electroporation, microinjection, and microprojectiles. In addition, bacteria from the genus Agrobacterium can be utilized to transform plant cells. Below are descriptions of representative techniques for transforming both dicotyledonous and monocotyledonous plants, as well as a representative plastid transformation technique.

[0261] A. Transformation of Dicotyledons

[0262] Transformation techniques for dicotyledons are well known in the art and include Agrobacterium-based techniques and techniques that do not require Agrobacterium. Non-Agrobacterium techniques involve the uptake of exogenous genetic material directly by protoplasts or cells. This can be accomplished by PEG or electroporation mediated uptake, particle bombardment-mediated delivery, or microinjection. Examples of these techniques are described by Paszkowski et al., EMBO J. 3: 2717-2722 (1984), Potrykus et al., Mol. Gen. Genet. 199: 169-177 (1985), Reich et al., Biotechnology 4: 1001-1004 (1986), and Klein et al., Nature 327: 70-73 (1987). In each case the transformed cells are regenerated to whole plants using standard techniques known in the art.

[0263] Agrobacterium-mediated transformation is a preferred technique for transformation of dicotyledons because of its high efficiency of transformation and its broad utility with many different species. Agrobacterium transformation typically involves the transfer of the binary vector carrying the foreign DNA of interest (e.g. pCIB200 or pCIB2001) to an appropriate Agrobacterium strain which may depend on the complement of vir genes carried by the host Agrobacterium strain either on a co-resident Ti plasmid or chromosomally (e.g. strain CIB542 for pCIB200 and pCIB2001 (Uknes et al. Plant Cell 5: 159-169 (1993)). The transfer of the recombinant binary vector to Agrobacterium is accomplished by a triparental mating procedure using E. coli carrying the recombinant binary vector, a helper E. coli strain which carries a plasmid such as pRK2013 and which is able to mobilize the recombinant binary vector to the target Agrobacterium strain. Alternatively, the recombinant binary vector can be transferred to Agrobacterium by DNA transformation (Höfgen & Willmitzer, Nucl. Acids Res. 16: 9877 (1988)).

[0264] Transformation of the target plant species by recombinant Agrobacterium usually involves co-cultivation of the Agrobacterium with explants from the plant and follows protocols well known in the art. Transformed tissue is regenerated on selectable medium carrying the antibiotic or herbicide resistance marker present between the binary plasmid T-DNA borders.

[0265] Another approach to transforming plant cells with a gene involves propelling inert or biologically active particles at plant tissues and cells. This technique is disclosed in U.S. Pat. Nos. 4,945,050, 5,036,006, and 5,100,792 all to Sanford et al. Generally, this procedure involves propelling inert or biologically active particles at the cells under conditions effective to penetrate the outer surface of the cell and afford incorporation within the interior thereof. When inert particles are utilized, the vector can be introduced into the cell by coating the particles with the vector containing the desired gene. Alternatively, the target cell can be surrounded by the vector so that the vector is carried into the cell by the wake of the particle. Biologically active particles (e.g., dried yeast cells, dried bacterium or a bacteriophage, each containing DNA sought to be introduced) can also be propelled into plant cell tissue.

[0266] B. Transformation of Monocotyledons

[0267] Transformation of most monocotyledon species has now also become routine. Preferred techniques include direct gene transfer into protoplasts using PEG or electroporation techniques, and particle bombardment into callus tissue. Transformations can be undertaken with a single DNA species or multiple DNA species (i.e. co-transformation) and both these techniques are suitable for use with this invention. Co-transformation may have the advantage of avoiding complete vector construction and of generating transgenic plants with unlinked loci for the gene of interest and the selectable marker, enabling the removal of the selectable marker in subsequent generations, should this be regarded desirable. However, a disadvantage of the use of co-transformation is the less than 100% frequency with which separate DNA species are integrated into the genome (Schocher et al. Biotechnology 4: 1093-1096 (1986)).

[0268] Patent Applications EP 0 292 435, EP 0 392 225, and WO 93/07278 describe techniques for the preparation of callus and protoplasts from an elite inbred line of maize, transformation of protoplasts using PEG or electroporation, and the regeneration of maize plants from transformed protoplasts. Gordon-Kamm et al. (Plant Cell 2: 603-618 (1990)) and Fromm et al. (Biotechnology 8: 833-839 (1990)) have published techniques for transformation of A188-derived maize line using particle bombardment. Furthermore, WO 93/07278 and Koziel et al. (Biotechnology 11: 194-200 (1993)) describe techniques for the transformation of elite inbred lines of maize by particle bombardment. This technique utilizes immature maize embryos of 1.5-2.5 mm length excised from a maize ear 14-15 days after pollination and a PDS-1000He Biolistics device for bombardment.

[0269] Transformation of rice can also be undertaken by direct gene transfer techniques utilizing protoplasts or particle bombardment. Protoplast-mediated transformation has been described for Japonica-types and Indica-types (Zhang et al. Plant Cell Rep 7: 379-384 (1988); Shimamoto et al. Nature 338: 274-277 (1989); Datta et al. Biotechnology 8: 736-740 (1990)). Both types are also routinely transformable using particle bombardment (Christou et al. Biotechnology 9: 957-962 (1991)). Furthermore, WO 93/21335 describes techniques for the transformation of rice via electroporation.

[0270] Patent Application EP 0 332 581 describes techniques for the generation, transformation and regeneration of Pooideae protoplasts. These techniques allow the transformation of Dactylis and wheat. Furthermore, wheat transformation has been described by Vasil et al. (Biotechnology 10: 667-674 (1992)) using particle bombardment into cells of type C long-term regenerable callus, and also by Vasil et al. (Biotechnology 11: 1553-1558 (1993)) and Weeks et al. (Plant Physiol. 102: 1077-1084 (1993)) using particle bombardment of immature embryos and immature embryo-derived callus. A preferred technique for wheat transformation, however, involves the transformation of wheat by particle bombardment of immature embryos and includes either a high sucrose or a high maltose step prior to gene delivery. Prior to bombardment, any number of embryos (0.75-1 mm in length) are plated onto MS medium with 3% sucrose (Murashiga & Skoog, Physiologia Plantarum 15: 473-497 (1962)) and 3 mg/l 2,4-D for induction of somatic embryos, which is allowed to proceed in the dark. On the chosen day of bombardment, embryos are removed from the induction medium and placed onto the osmoticum (i.e. induction medium with sucrose or maltose added at the desired concentration, typically 15%). The embryos are allowed to plasmolyze for 2-3 hours and are then bombarded. Twenty embryos per target plate is typical, although not critical. An appropriate gene-carrying plasmid (such as pCIB3064 or pSG35) is precipitated onto micrometer size gold particles using standard procedures. Each plate of embryos is shot with the DuPont Biolistics® helium device using a burst pressure of ˜1000 psi using a standard 80 mesh screen. After bombardment, the embryos are placed back into the dark to recover for about 24 hours (still on osmoticum). After 24 hrs, the embryos are removed from the osmoticum and placed back onto induction medium where they stay for about a month before regeneration. Approximately one month later the embryo explants with developing embryogenic callus are transferred to regeneration medium (MS+1 mg/liter NAA, 5 mg/liter GA), further containing the appropriate selection agent (10 mg/l basta in the case of pCIB3064 and 2 mg/l methotrexate in the case of pSOG35). After approximately one month, developed shoots are transferred to larger sterile containers known as “GA7s” which contain half-strength MS, 2% sucrose, and the same concentration of selection agent.

[0271] Transformation of monocotyledons using Agrobacterium has also been described. See, WO 94/00977 and U.S. Pat. No. 5,591,616, both of which are incorporated herein by reference. See also, Negrotto et al., Plant Cell Reports 19: 798-803 (2000), incorporated herein by reference.

### EXAMPLE 15

### Use of Expression Cassettes of the Present Invention to Confer Abiotic Stress Tolerance in Plants

[0272] Once initiated, maize female spikelets are by definition metabolic sinks. They require a nutrient stream consisting of carbohydrate, amino acids, cofactors, minerals and other material from source tissues to fuel development. Source tissues include leaves, roots, the stalk and other vegetative plant parts. Much of what arrives at each spikelet is rapidly consumed, being converted to cell wall material, protein, lipids, nucleic acids etc. Very little is held in reserve.

[0273] The nutrient stream subsides during periods of abiotic stress. This stress is imposed by a number of stimuli including drought, cloud cover, temperature extremes and soil nutrient depletion. Spikelet development continues despite growing conditions, relying on reserves for energy and raw material. Reserves maintain development for, at most, a few days. If the abiotic stress period is prolonged reserves are depleted and spikelet development ceases. The result is kernel abortion and reduced yield.

[0274] The OsMADS expression cassettes of the present invention can be used to increase the sink strength in female spikelets by fusing them to genes that function to increase sink strength. These genes include a sucrose transporter, invertase, and trehalose metabolism genes. Many of these genes are not highly expressed in early spikelet development. Early and specific expression in the reproductive organs of plants, spikelets for example, of any of these genes will improve spikelet nourishment without detriment to other plant organs. Improved nutrition will enable spikelets to complete their developmental cycle and become competent for fertilization during ideal growth conditions and, importantly, during prolonged periods of abiotic stress.

[0275] Carbon arrives at developing spikelets as sucrose. Spikelets have limited ability to utilize sucrose because enzymes facilitating its entry into metabolism are not highly expressed. These enzymes include sucrose transporter(s) to aid uptake of sucrose unloaded from the phloem. The OsMADS expression cassettes can increase sucrose transporter levels in the transmitting and other maternal tissue. Imported sucrose fuels development and excess sucrose is incorporated into starch and vacuolar reserves. Increased starch and sucrose reserves better enable spikelets to complete development during prolonged periods of abiotic stress.

[0276] Carbon nutrition can also be enhanced via increased invertase expression. This enzyme family cleaves sucrose into glucose and fructose. Both monosaccharides can be accumulated to high levels and rapidly enter carbon metabolism. The OSMADS expression cassettes of the present invention can be used to increase glucose and fructose levels in the apoplastic regions of spikelet and other maternal tissues via expression of an apoplastic or cell wall invertase. The monosaccharides enter cells and carbon metabolism more readily than sucrose. Facilitated sucrose utilization should increase sucrose unloading from the phloem, and carbon availability to developing spikelets.

[0277] Similarly, carbon nutrition in the cytosol of developing spikelets can be enhanced via expression of a cytosolic or neutral invertase. This enzyme cleaves sucrose in the cytosol, facilitating entry into carbon metabolism. The OSMADS expression cassettes of the present invention can increase neutral invertase expression in developing spikelets. The increased sucrose utilization in the cytosol, in transmitting and related spikelet tissue increases sucrose demand and thus, sucrose import from the apoplast.

[0278] Carbon availability and abiotic stress resistance in developing spikelets also can be enhanced via expression of a vacuolar or soluble acid invertase. This enzyme cleaves sucrose into fructose and glucose in the vacuole, making the carbon available for energy metabolism. Sucrose conversion into glucose and fructose also increases the solute potential of the cell, enabling it to maintain water and thus, turgor during periods of drought. This allows spikelets to continue developing despite decreased water availability. Again, the OSMADS expression cassettes of the present invention can increase expression of vacuolar or soluble acid invertase in developing spikelets for the purpose of enhancing abiotic stress tolerance.

[0279] The trehalose pathway functions to regulate carbon partitioning between primary metabolism and starch synthesis. Up-regulation of this pathway directs carbon towards starch synthesis. The OsMADS expression cassettes of the present invention can be used to drive expression of trehalose-6-phosphate synthase, trehalose-6-phosphate phosphatase and trehalase in developing spikelets, thereby increasing sink strength and starch synthesis in those tissues. Maintenance of a large starch pool better enables developing spikelets to withstand prolonged periods of abiotic stress and complete their development cycle.

[0280] Although the foregoing invention has been described in some detail by way of illustration and example for purposes of clarity of understanding, it will be obvious that certain changes and modifications may be practiced with the scope of the present invention.

### REFERENCES

[0281] Iyer M., Wu L., et al. V (2001) Two step transcriptional amplification as a method for imaging reporter gene expression using weak promoters PNAS 98(25):14595-14600.
[0282] De Bodt, S., Raes, J., Van de Peer, Y., and Theien, G. (2003) And then there were many: MADS goes genomic. Trends Plant Sci. 8(10): 475-483.
[0283] Larkin, J. C., Oppenheimer, D. G., Pollock, S., and Marks, M. D. (1993) Arabidopsis GLABROUS1 gene requires downstream sequences for function. Plant Cell. 5(12): 1739-1748.
[0284] Kang, H.-G. and An, G. (1997) Isolation and characterization of a rice MADS box gene belonging to the AGL2 gene family. Mol. Cells. 7(1), 45-51.
[0285] Onodera, Y., Suzuki, A., Wu, C.-Y., Washida, H., and Takaiwa, F. (2001) A rice functional transcriptional activator, RISBZ1, responsible for endosperm-specific expression of storage protein genes through GCN4 motif. J. Biol. Chem. 276(17): 14139-14152.
[0286] Sieburth, L. E., and Meyerowitz, E. M. (1997) Molecular dissection of the AGAMOUS control region shows that cis elements for spatial regulation are located intragenically. Plant Cell. 9(3): 355-365.
[0287] Yu, H., and Goh, C. J. (2000) Identification and characterization of three orchid MADS-box genes of the AP1/AGL9 subfamily during floral transition. Plant Physiol. 123: 1325-1336.
[0288] De Bodt et al (2003) And then there were many: MADS goes genomic. Trends Plant Sci. 8(10): 475-483.
[0289] Larkin et al (1993) Arabidopsis GLABROUS1 gene requires downstream sequences for function. Plant Cell. 5(12): 1739-1748.
[0290] Kang, H.-G. and An, G. (1997) Isolation and characterization of a rice MADS box gene belonging to the AGL2 gene family. Mol. Cells. 7(1), 45-51.
[0291] Onodera et al (2001) A rice functional transcriptional activator, RISBZ1, responsible for endosperm-specific expression of storage protein genes through GCN4 motif. J. Biol. Chem. 276(17): 14139-14152.
[0292] Sieburth, L. E., and Meyerowitz, E. M. (1997) Molecular dissection of the AGAMOUS control region shows that cis elements for spatial regulation are located intragenically. Plant Cell. 9(3): 355-365.
[0293] Yu, H., and Goh, C. J. (2000) Identification and characterization of three orchid MADS-box genes of the AP1/AGL9 subfamily during floral transition. Plant Physiol. 123: 1325-1336.
[0294] Batzer, et al (1991) Enhanced evolutionary PCR using oligonucleotides with inosine at the 3′-terminus. Nucleic Acid Res. 19:5081.
[0295] Ohtsuka, et al (1985) An alternative approach to deoxyoligonucleotides as hybridization probes by insertion of deoxyinosine at ambiguous codon positions. J. Biol. Chem. 260:2605-2608.
[0296] Rossolini, et al (1994) Use of deoxyinosine-containing primers vs degenerate primers for polymerase chain reaction based on ambiguous sequence information. Mol. Cell Probes 8:91-98.
[0297] Paszkowski et al (1984). Direct Gene Transfer to Plants. EMBO J. 3:2717-2722
[0298] Potrykus et al (1985) Molecular and general genetics of a hybrid foreign gene introduced into tobacco by direct gene transfer. Mol. Gen. Genet. 199:169-177
[0299] Reich et al (1986) Efficient transformation of alfalfa protoplasts by the intranuclear microinjection of Ti-plasmids. Bio/Technology 4:1001-1004
[0300] Klein et al (1987) High velocity microprojectiles for delivering nucleic acids into living cells. Nature 327:70-73.
[0301] Uknes et al (1993) Regulation of pathogenesis-related protein-1a gene expression in tobacco. Plant Cell 5:159-169
[0302] Hofgen, R, and Willmitzer, L (1988) Storage of competent cells for Agrobacterium transformation. Nucl. Acid Res. 16:9877
[0303] Schocher et al (1986) Co-transformation of foreign genes into plants. Bio/Technology 4:1093-1096
[0304] Gordon-Kamm et al (1990) Transformation of Maize Cells and Regeneration of Fertile Transgenic Plants. Plant Cell 2:603-618
[0305] Fromm et al (1990) Inheritance and expression of chimeric genes in the progeny of transgenic maize plants. Bio/Technology 8:833-839.
[0306] Koziel et al (1993) Field performance of elite transgenic maize plants expressing an insecticidal protein derived from Bacillus thuringiensis. Bio/Technology 11:194-200
[0307] Zhang et al (1988) Transgenic rice plants produced by electroporation-mediated plasmid uptake into protoplasts. Plant Cell Rep. 7:379-384
[0308] Shimamoto et al (1989) Fertile transgenic rice plants regenerated from transformed protoplasts. Nature 338:274-277.
[0309] Datta et al (1990) Genetically engineered fertile Indica-rice recovered from protoplasts. Bio/Technology 8:736-740
[0310] Christou et al (1991) Production of transgenic rice (Oryza sativa L.) plants from agronomically important indica and japonica varieties via electric-discharge particle acceleration of exogenous DNA into immature zygotic embryos. Bio/Technology 9:957-962
[0311] Vasil et al (1992) Herbicide resistant fertile transgenic wheat plants obtained by microprojectile bombardment of regenerable embryogenic callus. Bio/Technology 10:667-674
[0312] Vasil et al (1993) Rapid production of transgenic plants by direct bombardment of cultured immature embryos. Bio/Technology 11:1553-1558
[0313] Weeks et al (1993) Rapid Production of Multiple Independent Lines of Fertile Transgenic Wheat (Triticum aestivum). Plant Physiol. 1102:1077-1084
[0314] Murashiga et al (1962) A revised medium for rapid grwoth and bio-essays with tobacco tissue cultures. Physiologia Plantarum 15:473-497
[0315] Negrotto et al (2000) The use of phosphomannose isomerase as a selectable marker to recover transgenic maize plants (Zea mays L.) via Agrobacterium transformation. Plant Cell Reports 19:798-803
[0316] Eastmond, P. J., van Dijken, A. J. H., Spielman, M., Kerr, A., Tissier, A. F., Dickinson, H. G., Jones, J. D. G., Smeekens, S. C., Graham, I. A. (2002). Trehalose-6-phosphate synthase 1, which catalyses the first step in trehalose synthesis, is essential for Arabidopsis embryo maturation. Plant J. 29, 225-235.
[0317] Nuccio, M. L., Russell, B. L., Nolte, K. D., Rathinasabapathi, B., Gage, D. A., Hanson, D. A. (1998). The endogenous choline supply limits glycine betaine synthesis in transgenic tobacco expressing choline monooxygenase. Plant J. 16, 487-496.
[0318] Ranocha, P., McNeil, S. D., Ziemak, M. J., Li, C., Tarczynski, M. C., and Hanson, A. D. (2001). The S-methylmethionine cycle in angiosperms: ubiquity, antiquity and activity. Plant J. 25, 575-584.
[0319] Ritchie, S. W., Hanway, J. J., Benson, G. O. (1997). How a Corn Plant Develops. Special Report No. 48. Iowa State University of Science and Technology Cooperative Extension Service. Ames, Iowa.
[0320] Rontein, D., Dieuaide-Noubhani, M., Dufourc, E. J., Raymond, P., Rolin, D. (2002b). The metabolic architecture of plant cells. Stability of central metabolism and flexibility of anabolic pathways during the growth cycle of tomato cells. J. Biol. Chem. 277, 42948-43960.
[0321] Vogel, G., Aeschbacher, R. A., Müller, J., Boller, T. and Wiemken, A. (1998). Trehalose-6-phosphate phosphatases from Arabidopsis thaliana: identification by functional complementation of the yeast tps2 mutant. Plant J. 13, 673-683.
[0322] Wingler, A. (2002). The function of trehalose biosynthesis in plants. Phytochem. 60, 437-440.

The application's sequence listing, which the Patent Office published only in electronic form, follows.

SEQUENCE LISTING (539 sequences)

SEQ ID NO: 1 - DNA, 1027 bp, Oryza sativa
  CDS (125)..(802): OsMADS5
aagactgcaagggagagggagagagagggaagcttgcaggctgcagctaactagctaggcaaggagagagaggagatagatcaagaagagattttgagaccgagagagagctagagagagatcgatggggcgagggaaagtagagctgaagcggatcgagaacaagataagccggcaggtgacgttcgcgaagaggaggaacgggctgctgaagaaggcgtacgagctgtccgtgctctgcgacgccgaggtcgccctcatcatcttctccacccgcggccgcctcttcgagttctccacctcctcctgtatgtacaagacactggagcgataccgcagttgcaactacaaccttaactcatgtgaagcatctgctgcactggaaactgaactaagcaattaccaagagtacttaaagttaaagacaagagttgagttcctacaaacaactcagagaaatcttcttggcgaggacttggttccacttagcttgaaggagctcgagcaacttgagaaccagatcgagatatccctcatgaatatcaggtcatcaaagaatcaacagttgcttgatcaagtatttgagctcaaacgtaaggaacaacaacttcaagatgctaataaagacttaaaaaggaagatacaagaaactagtggagaaaatatgcttcatatatcttgccaagatgtagggcccagtggccatgctagtgaagctaaccaagagtttctccatcatgcaatttgtgacccttccctgcatatagggtatcaagcttacatggatcacctcaaccaatgaatgaattgcttatcacattaatggacatctcctatgttggatgtggtgtttgacgtaatgctctcttttacatgcgggttttaccttaagtgtgtgtgctaaatttagtgcgtttgtttatgctcttttgaactgaacaaaggaatgatcccggtttgattgatgaatgctgcaagaacataatctatatgttagtctgaattcagtatgtaatgaagatgtttt

SEQ ID NO: 2 - protein, 225 aa, Oryza sativa
MGRGKVELKRIENKISRQVTFAKRRNGLLKKAYELSVLCDAEVALIIFSTRGRLFEFSTSSCMYKTLERYRSCNYNLNSCEASAALETELSNYQEYLKLKTRVEFLQTTQRNLLGEDLVPLSLKELEQLENQIEISLMNIRSSKNQQLLDQVFELKRKEQQLQDANKDLKRKIQETSGENMLHISCQDVGPSGHASEANQEFLHHAICDPSLHIGYQAYMDHLNQ

SEQ ID NO: 3 - DNA, 1043 bp, Oryza sativa
  CDS (34)..(786): OsMADS6
tacccgcgggaatcgttcgatcgatcgggcgagatggggaggggaagagttgagctgaagcgcatcgagaacaagatcaacaggcaggtcaccttctccaagcgccgcaacggcctcctcaagaaggcctacgagctgtccgttctctgcgacgccgaggtcgcgctcatcatcttctccagccgcggcaagctctacgagttcggcagcgccggcataacaaagactttagaaaggtaccaacattgttgctacaatgctcaagattccaacaatgcactttctgaaactcagagttggtaccatgaaatgtcaaagttgaaagcaaaatttgaagctttgcagcgcactcaaaggcacttgcttggggaggatcttggaccactcagcgtcaaagaattgcagcagctggagaaacagcttgaatgtgcactatcacaggcgagacagagaaagacgcaactgatgatggaacaggtggaggaacttcgcagaaaggagcgtcagctgggtgaaattaataggcaactcaagcacaagctcgaggttgaaggttccaccagcaactacagagccatgcagcaagcctcctgggctcagggcgccgtggtggagaatggcgccgcatacgtgcagccgccgccacactccgcggccatggactctgaacccaccttgcaaattgggtatcctcatcaatttgtgcctgctgaagcaaacactattcagaggagcactgcccctgcaggtgcagagaacaacttcatgctgggatgggttctttgagctaagcagccatcgatcagctgtcagaagttggagctaataataaaagggatgtggagtgggctacatgtatctcggatctctctgcgagccacctaatggtcttgcgtggccctttaatctgtatgtttttgtgtgtaagctactgctagctgtttgcaccttctgcgtccgtggttgtgtttccgtgctacctttttatgttttgatttggatcttgtttgaaaataatcttaccagctttgggtaaactgttt

SEQ ID NO: 4 - protein, 250 aa, Oryza sativa
MGRGRVELKRIENKINRQVTFSKRRNGLLKKAYELSVLCDAEVALIIFSSRGKLYEFGSAGITKTLERYQHCCYNAQDSNNALSETQSWYHEMSKLKAKFEALQRTQRHLLGEDLGPLSVKELQQLEKQLECALSQARQRKTQLMMEQVEELRRKERQLGEINRQLKHKLEVEGSTSNYRAMQQASWAQGAVVENGAAYVQPPPHSAAMDSEPTLQIGYPHQFVPAEANTIQRSTAPAGAENNFMLGWVL

SEQ ID NO: 5 - DNA, 5392 bp, Oryza sativa
  misc_feature (1)..(2245): 5' non-transcribed sequence
  misc_feature (1)..(5392): OsMADS5 5' regulatory sequence
  misc_feature (2246)..(2554): exon
  misc_feature (2555)..(5388): intron
  misc_feature (5389)..(5392): exon
tgagcaggtagccggcgaccaatcgcgagcgtcgccaacacgctgccttttctcaatgcatggcgtgggccccaccaggggccatttttttctctttaaaaaggagaaaagcaatcagagttgagacctccgagcgcgagacccaacatctatccctgggcccgcccaaaatccatttccaggtagttgtagccaaagaatcaaggatactccgatcgtttgagtggaaataataactcctacatgtaaaattaattaaggcctctatttgtatgaaaaaacataaaaaaaggatttttaatcttattgaaaaaaaatcctaaggataacttcgaataaatgattaaatcttaacattttctttgaaattcatatggaacaaacaatgctatagagactttggaggaattaaagttattaagagctctaaccttttaaaagattaccaatgagtctatataggtagttgtagccaaagaatcaaggatactccgatcgtttgagtggaaataataactcctacatgtaaaattaattaaggcctctatttgtatgaaaaaacataaaaaaaggatttttaatcttattgaaaaaaaatcctaaggataacttcgaataaatgattaaatcttaacattttctttgaaattcatatggaacaaacaatgctatagagactttggaggaattaaagttattaagagctctaaccttttaaaagattaccaatgagtctatataggtagttgtagccaaagaatcaaggatactccgatcgtttgagtggaaataataactcctacatgtaaaattaattaaggcctctatttgtatgaaaaaacataaaaaaaggatttttaatcttattgaaaaaaaaatcctaaagataacttcgaataaatgattaaatcttaacattttctttgaaattcatatggaacaaacaatgctatagagactttggaggaattaaagttattaagagctctaaccttttaaaagattaccaatgagtctatataggtagttgtagccaaagaatcaaggatactccgatcgtttgagtggaaataataactcctacatgtaaaattaattaaggcctctatttgtatgaaaaaacataaaaaaaggatttttaatcttattgaaaaaaaatcctaaggataacttcgaataaatgattaaatcttaacattttctttgaaattcatatggaacaaacaatgctatagagactttggaggaattaaagttattaagagctctaaccttttaaaagattaccaatgagtctatataggtagttgtagccaaagaatcaaggatactccgatcgtttgagtggaaataataactcctacatgtaaaattaattaaggcctctatttgtatgaaaaaacataaaaaaaggatttttaatcttattgaaaaaaaaatcctaaagataacttcgaataaatgattaaatcttaacattttctttgaaattcatatggaacaaacaatgctatagagactttggaggaattaaagttattaagagctctaaccttttaaaagattaccaatgagtctatatcactcattcaattcctacgtttttcaaatggcctacatactcaaatggttgttcttggttttttttttctctctttcgcaattacaatggacctgctcgcaacttttgcaatctgtctatgttttttatgtttagcagctgcgctgctgcagctgaacaaaaaaaaacactgtgacgattggctgcaacacaatgaaaatgagtgcagccgaacagagccaatatcttcaaaatcttgtttttttcatcttccatttttcaatcatttattttaaaggagcccttaattaatggttaagaaattttatatcttgcattttaaaggataatgctgataatcaaatagactacggtgaaaaaaactttaaaactaaatgtaagattaaatttcacacttaaattttactagctacggctgataattaagctaacaacttactgtgactgacttggtcatagggggagagagagagagagagagagagagagagagagagagagagagagagagagagagagagagagagagagagagagagagagagagagaaaagaaggcaaggagcactccggccagcacagccgatggtacgagagcatggctagctagccgagctacttagctactacatccatgatccatccatccccaacaaacggagcaagactgcaagggagagggagagagagggaagcttgcaggctgcagctaactagctaggcaaggagagagaggagatagatcaagaagagattttgagaccgagagagagctagagagagatcgatggggcgagggaaagtagagctgaagcggatcgagaacaagataagccggcaggtgacgttcgcgaagaggaggaacgggctgctgaagaaggcgtacgagctgtccgtgctctgcgacgccgaggtcgccctcatcatcttctccacccgcggccgcctcttcgagttctccacctcctcctggtactactaataattctctcttgcaagctctcgccccttgcagagaattcatatatatctcgccctaattctaatgcaaagttagttaattagtttgcagccaagaaagactagttttctcgttatgagtttttgaagctccttgtgatttctgggctagctactgcccacctagctaccatgttctaattaatcatcagtccgtgtgtttaattaacatctcatgtttgtccgggaagttcttacacccagtcttttccctgctgctttgtttgtgtttaaaacatatatataccagcatttcgtttgtatttgttggaatttttaccaatctttctcaaagatcctgattttagttaatttttaccacctcgatcgtgatcatatacatgctcatagctgattaactaacctgttcctgttgttgttttggttaaagaaagagagacaggacagccgttctagtcacctgatggctgccgatctgtgtgtgtttgccgtcccctaattcctctttacggtttgcagttgccatagagactacgtactctgtcaacagaatcaagcatgcaatctctccatgcttgcttccatttgtaggctagagctgcatgctagatatctctaagctgatctcttccatgcttgtctctctagctctttcattagtgcatgcaattttcagagtgaagtagatgagacccctccagatctgcacaagaacatggcatatagtactactagtacgcatattgcatcttaattctcatattgcacaagcacatatactaggctgcagtgccttttccaatggcaagttatttttgtcagatcttaattaggagcatcttttccaatggcaagttgggagggtttcttgctctggttttactgttccattgggaactcgcaacataggggttgttcttgggttccactgttccattgagtctctctctctttctctctagctaggtttctctctctacgtcttgtcaaatgtctcggctgtactagtgtgcatgcgattgcagctgcagaagcaagaggaaaagtagtaatgcagcagcaggaggaaaagtcgtaggagtactcgtggagataagcatctctgtatcgatcgtctcgtcggttgttatcctccctgtggatatgtacacggtccgtgtttagatccaaaataattcatcaaacttttaactttttcatcacatcaaaacttttctacacacataaacttttaacttttacgtcacatcgtttcaatttcaaccaaacttctaagggcccctttgaattggaggaaaaacataggaattttagaggatttcaatcctatagaaaaatttcctatgaagccctttgaaacaaatgattgaatcctatccaatcctttgaaattcctatggaatggacaatcctatagagattttggaggaaatttagcaagagcttcaacctcttgctaactttcctttgagtctatctctctcatctaattcctgcgtttttcctgcggttcaatcaaacggtcattcatgtgtttttcctgcgttttgcaatcctctgttttacacttacattcctaccaaaatcctacgtttttcctattcctacgttttttcaatcctgcgattcaaagggaccctaattttggtgtgaactaaacacagcctagttgtagttgtgtggtacgaaagatcgaattgatttctagctaggcgtggccggacacacacccaagttaattcactgcattcgtaatttcatactcctatgcgattcataatttcacatgcgatgatgcgaatagattgatttgatcatttgaacattgtcatatggtatgcaaacaacttatcgtgcgagaggcgtgcgtgtcgattgccaaaattttctgtcagcgcacagtacaggctagctagtctggaacgaggttgtgtcgatttacaaggcacagttactagctaccctaccgttagggtatgtagtaggagtacttgtgtaccaaaagtttggattggttgaattttccaagctcctagtcacaatgtactccctccttttccctccccaaaaaatatactccttctatccagtatccacaaagaaaataatgtaactctagcatttaaaagacaaattagcaagaagtaaaatgattgggagtgaaattgtggttgggggtaaaatagggatcataatttgaatgaggggggtggttgtagggaaaaatagtactgcactcctttagaattgcacttattttgaaacaaaatctgaatgttagttacaattgtttttttctaaaaaaacagagtacaattttctaataatttaacacaaatcaatcaaatatatacatgtttgtaagtgatagtgtttatagctccaaacagggtttgaaatttcggctcgaaatttcgcccccaccgaaatgttcatatctcgcccgaaactttcggttgtttgcaaatttttgtgaatttggtcaaattttattcaaatccattcaaaatcagtcaaaaattcaaaaaaaatcgtacgaaaaaaaaatctgaaattttggttatatcgcccacctgcggtagaaatccttctttcgaaatttaaaaccctggctccaaacttagggtgcgctgtgcacataccctagaaaatataactgatatatgctccattaattatgaaaggcaaaataaactgatcatgcatatgtaggaaaatcgggttgtatatacatgtatttaaacaacaaaatataatataacaactttaactgatactgcattgaaaatagttttgtggtccactgattttcttttttgtaacagtatg

SEQ ID NO: 6 - DNA, 5412 bp, Oryza sativa
  misc_feature (1)..(5412): OsMADS5 5' regulatory sequence engineered
  misc_feature (1)..(13): Engineered sequence
  misc_feature (1)..(2258): 5'-nontranscribed sequence
  misc_feature (2259)..(2567): Exon
  misc_feature (2379)..(2384): Engineered sequence
  misc_feature (2568)..(5400): intron
  misc_feature (5401)..(5412): partial exon
  misc_feature (5404)..(5412): Engineered sequence
ctcgaggcgcgcctgagcaggtagccggcgaccaatcgcgagcgtcgccaacacgctgccttttctcaatgcatggcgtgggccccaccaggggccatttttttctctttaaaaaggagaaaagcaatcagagttgagacctccgagcgcgagacccaacatctatccctgggcccgcccaaaatccatttccaggtagttgtagccaaagaatcaaggatactccgatcgtttgagtggaaataataactcctacatgtaaaattaattaaggcctctatttgtatgaaaaaacataaaaaaaggatttttaatcttattgaaaaaaaatcctaaggataacttcgaataaatgattaaatcttaacattttctttgaaattcatatggaacaaacaatgctatagagactttggaggaattaaagttattaagagctctaaccttttaaaagattaccaatgagtctatataggtagttgtagccaaagaatcaaggatactccgatcgtttgagtggaaataataactcctacatgtaaaattaattaaggcctctatttgtatgaaaaaacataaaaaaaggatttttaatcttattgaaaaaaaatcctaaggataacttcgaataaatgattaaatcttaacattttctttgaaattcatatggaacaaacaatgctatagagactttggaggaattaaagttattaagagctctaaccttttaaaagattaccaatgagtctatataggtagttgtagccaaagaatcaaggatactccgatcgtttgagtggaaataataactcctacatgtaaaattaattaaggcctctatttgtatgaaaaaacataaaaaaaggatttttaatcttattgaaaaaaaatcctaaggataacttcgaataaatgattagatcttaacattttctttgaaattcatatggaacaaacaatgctatagagactttggaggaattaaagttattaagagctctaaccttttaaaagattaccaatgagtctatataggtagttgtagccaaagaatcaaggatactccgatcgtttgagtggaaataataactcctacatgtaaaattaattaaggcctctatttgtatgaaaaaacataaaaaaaggatttttaatcttattgaaaaaaaatcctaaggataacttcgaataaatgattaaatcttaacattttctttgaaattcatatggaacaaacaatgctatagagactttggaggaattaaagttattaagagctctaaccttttaaaagattaccaatgagtctatataggtagttgtagccaaagaatcaaggatactccgatcgtttgagtggaaataataactcctacatgtaaaattaattaaggcctctatttgtatgaaaaaacataaaaaaaggatttttaatcttattgaaaaaaaaatcctaaagataacttcgaataaatgattaaatcttaacattttctttgaaattcatatggaacaaacaatgctatagagactttggaggaattaaagttattaagagctctaaccttttaaaagattaccaatgagtctatatcactcattcaattcctacgtttttcaaatggcctacatactcaaatggttgttcttgttttttttttctctctttcgcaattacaatggacctgctcgcaacttttgcaatctgtctatgttttttatgtttagcagctgcgctgctgcagctgaacaaaaaaaaacactgtgacgattggctgcaacacaatgaaaatgagtgcagccgaacagagccaatatcttcaaaatcttgtttttttcatcttccatttttcaatcatttattttaaaggagcccttaattaatggttaagaaattttatatcttgcattttaaaggataatgctgataatcaaatagactacggtgaaaaaaactttaaaactaaatgtaagattaaatttcacacttaaattttactagctacggctgataattaagctaacaacttactgtgactgacttggtcatagggggagagagagagagagagagagagagagagagagagagagagagagagagagagagagagagagagagagagagagagagagagagagagaaaagaaggcaaggagcactccggccagcacagccgatggtacgagagcatggctagctagccgagctacttagctactacatccatgatccatccatccccaacaaacggagcaagactgcaagggagagggagagagagggaagcttgcaggctgcagctaactagctaggcaaggagagagaggagatagatcaagaagagattttgagaccgagagagagctagagagagctcgacggggcgagggaaagtagagctgaagcggatcgagaacaagataagccggcaggtgacgttcgcgaagaggaggaacgggctgctgaagaaggcgtacgagctgtccgtgctctgcgacgccgaggtcgccctcatcatcttctccacccgcggccgcctcttcgagttctccacctcctcctggtactactaataattctctcttgcaagctctcgccccttgcagagaattcatatatatctcgccctaattctaatgcaaagttagttaattagtttgcagccaagaaagactagttttctcgttatgagtttttgaagctccttgtgatttctgggctagctactgcccacctagctaccatgttctaattaatcatcagtccgtgtgtttaattaacatctcatgtttgtccgggaagttcttacacccagtcttttccctgctgctttgtttgtgtttaaaacatatatataccagcatttcgtttgtatttgttggaatttttaccaatctttctcaaagatcctgattttagttaatttttaccacctcgatcgtgatcatatacatgctcatagctgattaactaacctgttcctgttgttgttttggttaaagaaagagagacaggacagccgttctagtcacctgatggctgccgatctgtgtgtgtttgccgtcccctaattcctctttacggtttgcagttgccatagagactagtactctgtcaacagaatcaagcatgcaatctctccatgcttgcttccatttgtaggctagagctgcatgctagatatctctaagctgatctcttccatgcttgtctctctagctctttcattagtgcatgcaattttcagagtgaagtagatgagacccctccagatctgcacaagaacatggcatatagtactactagtacgcatattgcatcttaattctcatattgcacaagcacatatactaggctgcagtgccttttccaatggcaagttatttttgtcagatcttaattaggagcatcttttccaatggcaagttgggagggtttcttgctctggttttactgttccattgggaactcgcaacataggggttgttcttgggttccactgttccattgagtctctctctctttctctctagctaggtttctctctctacgtcttgtcaaatgtctcggctgtactagtgtgcatgcgattgcagctgcagaagcaagaggaaaagtagtaatgcagcagcaggaggaaaagtcgtaggagtactcgtggagataagcatctctgtatcgatcgtctcgtcggttgttatcctccctgtggatatgtacacggtccgtgtttagatccaaaataattcatcaaacttttaactttttcatcacatcaaaacttttctacacacataaacttttaacttttacgtcacatcgtttcaatttcaaccaaacttctaagggcccctttgaattggaggaaaaacataggaattttagaggatttcaatcctatagaaaaatttcctatgaagccctttgaaacaaatgattgaatcctatccaatcctttgaaattcctatggaatggacaatcctatagagattttggaggaaatttagcaagagcttcaacctcttgctaactttcctttgagtctatctctctcatctaattcctgcgtttttcctgcggttcaatcaaacggtcattcatgtgtttttcctgcgttttgcaatcctctgttttacacttacattcctaccaaaatcctacgtttttcctattcctacgttttttcaatcctgcgattcaaagggaccctaattttggtgtgaactaaacacagcctagttgtagttgtgtggtacgaaagatcgaattgatttctagctaggcgtggccggacacacacccaagttaattcactgcattcgtaatttcatactcctatgcgattcataatttcacatgcgatgatgcgaatagattgatttgatcatttgaacattgtcatatggtatgcaaacaacttatcgtgcgagaggcgtgcgtgtcgattgccaaaattttctgtcagcgcacagtacaggctagctagtctggaacgaggttgtgtcgatttacaaggcacagttactagctaccctaccgttagggtatgtagtaggagtacttgtgtaccaaaagtttggattggttgaattttccaagctcctagtcacaatgtactccctccttttccctccccaaaaaatatactccttctatccagtatccacaaagaaaataatgtaactctagcatttaaaagacaaattagcaagaagtaaaatgattgggagtgaaattgtggttgggggtaaaatagggatcataatttgaatgaggggggtggttgtagggaaaaatagtactgcactcctttagaattgcacttattttgaaacaaaatctgaatgttagttacaattgtttttttctaaaaaaacagagtacaattttctaataatttaacacaaatcaatcaaatatatacatgtttgtaagtgatagtgtttatagctccaaacagggtttgaaatttcggctcgaaatttcgcccccaccgaaatgttcatatctcgcccgaaactttcggttgtttgcaaatttttgtgaatttggtcaaattttattcaaatccattcaaaatcagtcaaaaattcaaaaaaaatcgtacgaaaaaaaaatctgaaattttggttatatcgcccacctgcggtagaaatccttctttcgaaatttaaaaccctggctccaaacttagggtgcgctgtgcacataccctagaaaatataactgatatatgctccattaattatgaaaggcaaaataaactgatcatgcatatgtaggaaaatcgggttgtatatacatgtatttaaacaacaaaatataatataacaactttaactgatactgcattgaaaatagttttgtggtccactgattttcttttttgtaacagtatccaccatgg

SEQ ID NO: 7 - DNA, 124 bp, Oryza sativa
  misc_feature (1)..(124): OsMADS5 5'-untranslated leader sequence - natural
aagactgcaagggagagggagagagagggaagcttgcaggctgcagctaactagctaggcaaggagagagaggagatagatcaagaagagattttgagaccgagagagagctagagagagatcg

SEQ ID NO: 8 - DNA, 317 bp, Oryza sativa
  misc_feature (1)..(317): OsMADS5 5'-untranslated leader sequences - engineered
  misc_feature (121)..(125): engineered sequence
  misc_feature (313)..(317): Engineered sequence
aagactgcaagggagagggagagagagggaagcttgcaggctgcagctaactagctaggcaaggagagagaggagatagatcaagaagagattttgagaccgagagagagctagagagagctcgacggggcgagggaaagtagagctgaagcggatcgagaacaagataagccggcaggtgacgttcgcgaagaggaggaacgggctgctgaagaaggcgtacgagctgtccgtgctctgcgacgccgaggtcgccctcatcatcttctccacccgcggccgcctcttcgagttctccacctcctcctgtatccacc

SEQ ID NO: 9 - DNA, 1215 bp, Oryza sativa
  misc_feature (1)..(1215): OsMADS5 terminus
  misc_feature (1)..(228): 3'-untranslated sequence
  misc_feature (229)..(1215): 3'-nontranscribed sequence
atgaattgcttatcacattaatggacatctcctatgttggatgtggtgtttgacgtaatgctctcttttacatgcgggttttaccttaagtgtgtgtgctaaatttagtgcgtttgtttatgctcttttgaactgaacaaaggaatgatcccggtttgattgatgaatgctgcaagaacataatctatatgttagtctgaattcagtatgtaatgaagatgttttgttactaattaataaatacgaagtaaacaattaactgaccactaatcatgtcagcttagatatatgcttataattatgttgcctaattcttaccttaattggtctgtgttcaatatatgtgagtataccacactagttgtttctcagcatgaactaattaagtgtgagtagataaaacgagtaaattggaatgtaagaaaaggtaaaaataaagtacttattaaagagagagtgcatgccaaaagtacgaagagaaaaacttagaatattagttacaatataatatataatcaagtgcttcgttcgaacccatacatgtttgtttttcttatttttctaatatttcttcaccatataggttccccaggttgcactccgaaaggtcgtgtaatgtgtatttagtagcacacatagttacatcactgcttattttctcatccactagccacaagattgtgtgcgtgtgaccatctcaattagatccatctcctccttcacatgcacggtattgatttgtgctagacctgccggtgtctccaatggtgatgatccagctgattcatcgtcttggaggacatcatcgtcccatgccatttccatatctatctcatggccaatcttgttagcataatcaatgtggttgaagatgtagttcatgtcaacatcatcatctatgttgtaaacctggtacggcatctcgtccttcgtttcgaacaaatgatcacacatatcaaggcataaatcatcataggtagagaccaggagttcttcacaagagttggtctggatgtagctgttctcatccatggtgagtattccctgggtgaccatttggttggatgggttggaatctggcctgatcttaccattcacctctgctaacttttgtgtggatgctggtgaagacgatgacactgcagtagattctggtggagcttgacgaacacttgacttgattggaccaattccaaggctcttgatgtagttttg

SEQ ID NO: 10 - DNA, 1089 bp, Oryza sativa
  misc_feature (1)..(1089): OsMADS5 3'-regulatory sequence engineered
  misc_feature (1)..(31): engineered sequence
  misc_feature (1)..(275): 3'-untranslated sequence
  misc_feature (276)..(1089): 3'-nontranscribed sequence
  misc_feature (1078)..(1089): Engineered sequence
gagctccgcgggcggccgcactagtcccgggccatggggggtctagaatgaattgcttatcacattaatggacatctcctatgttggatgtggtgtttgacgtaatgctctcttttacatgcgggttttaccttaagtgtgtgtgctaaatttagtgcgtttgtttatgctcttttgaactgaacaaaggaatgatcccggtttgattgatgaatgctgcaagaacataatctatatgttagtctgaattcagtatgtaatgaagatgttttgttactaattaataaatacgaagtaaacaattaactgaccactaatcatgtcagcttagatatatgcttataattatgttgcctaattcttaccttaattggtctgtgttcaatatatgtgagtataccacactagttgtttctcagcatgaactaattaagtgtgagtagataaaacgagtaaattggaatgtaagaaaaggtaaaaataaagtacttattaaagagagagtgcatgccaaaagtacgaagagaaaaacttagaatattagttacaatataatatataatcaagtgcttcgttcgaacccatacatgtttgtttttcttatttttctaatatttcttcaccatataggttccccaggttgcactccgaaaggtcgtgtaatgtgtatttagtagcacacatagttacatcactgcttattttctcatccactagccacaagattgtgtgcgtgtgaccatctcaattagatccatctcctccttcacatgcacggtattgatttgtgctagacctgccggtgtctccaatggtgatgatccagctgattcatcgtcttggaggacatcatcgtcccatgccatttccatatctatctcatggccaatcttgttagcataatcaatgtggttgaagatgtagttcatgtcaacatcatcatctatgttgtaaacctggtacggcatctcgtccttcgtttcgaacaaatgatcacacatatcaaggcataaatcatcataggtagagaccaggagttcttcacaagagttggtctggatgtagctgttctcatccggcgcgcccggg

SEQ ID NO: 11 - DNA, 4450 bp, Oryza sativa
  misc_feature (1)..(4450): OsMADS6
  misc_feature (1)..(1460): 5'-nontranscribed sequence
  misc_feature (1168)..(1168): r is a or g
  misc_feature (1461)..(1667): exon
  misc_feature (1668)..(4425): intron
  misc_feature (2577)..(2579): k is g or t
  misc_feature (2580)..(2580): y is c or t
  misc_feature (4426)..(4450): exon
gacgatggtgtgatgtgggaacacgaagaaaacatgaggaaaaaatattaaaatgaatttcccacttaaaatgcatcaaataaaaaaaataaagaaacgaccgggaatagacacaggatttgtgaactagctagggcaaacatcatatggtcccttgctgatgcacaagtacattgagatgtcatttcaattctgtgcatcatatgcatgtggtcccttgctgaatattactcttgaaatatctaccagtgccaatctattgcatgacttaattaattcacaggttttgttgattacattattagtaagcttgagagcacaagctcaatggatttttctataaatggggatcattttgcaattttctttgtcgtgcaaagttagccttctttattactacttctgtttttaaatatacgatcctattgacttttggtcatatatttaaccatgtatcttatttagatagtttgcgcaaatatatataccttcaatgataaaattagttacaatgaaacaaatgatatttacgcaattctttttactaaacaagtcacaagaagtacctgcagcaatatatgttggaaccgtgcagtagatcgagcctagctacgcaaaaaaacaaaaagagaaaaaaagggaaaggaaaaacattaatcatgcatgagcagtatgcccggcaactggaatttgtcaaagatatggggagaggagaataatacaagtactactactacctagctctaccatgcatatgcacccaaaggcaaactggattattggataaagcacagatgctggcaaaacaatccttaagcctcccctccctgcttctttatttttgggcagcctctaccggacggtgccgtggtccattggaccagtaggtggcgacatacatggtttgggttaagtctaggagagcagtgtgtgtgcgcgcgcaagagagagagactgtgagtctgggagtagccctctcccctcctttggccatcttcctcgtgtatatgcatatatgcatcatcgcaacggtgtatatttgtggtgtggcgggtgtggcattggattgcccccattttggctcgtgcttcccagttagggtaaaacctgtggtaaacttgctagccccacgccaaagttacccttctttattgttgaaagggagagraggtgtgtgaattgtgatggagggagagagagagagatagaaagagagatgtgtgtcaaagcaagcaagaaaccagtttcacaaagagctactactagtactagtgtactactgtggtacagtgcccaatgtcctttctccggactcgactccactaatattctcctcttctcgcgcggctcgttatattctcgtcatcattggaggctttagcaagcaagaagagaggcagtggtggtggtggtggaggaggagctagctagcctgtgcttgctgatcggtgctgagctgaggaatcgttcgatcgatcgggcgagatggggaggggaagagttgagctgaagcgcatcgagaacaagatcaacaggcaggtcaccttctccaagcgccgcaacggcctcctcaagaaggcctacgagctgtccgttctctgcgacgccgaggtcgcgctcatcatcttctccagccgcggcaagctctacgagttcggcagcgccgggtataattaatacagacacaacaacacacacaaccaacaaaccagcatcaatttgaacctgcagatctgctgttttctctgatcaattgcttctttttttttgttcttttttgtttcttttatctgctgcaacggcgtcctgctcctctggggtttctcgttttctttttcatttatttttagcaggtgccaagtagccgagctactatacttacctggccatgttaattattttattccgtctgtctgtgtgtgtctgtgcatactactatagggacatggcgcggtgttcttataaaccgggaggccggatccctaactagcatgggaggatatcttttcagcggatctatacaaaccctactcctgctgacctctttcttccagtttctccgggtcttccttggattattattgcccatcttccgggttgtgcgtgtgtcagagacagctcgaacgataaatttctcaaaaccagtactagagagggtgtgttgtgtgtgagaactgagtggagagttagcatgaaggctgcaaactagaaaggaaggtatgttctttcctttttgatccatcaggggagccccttctggtattaagatctttccggcacattgattttcatactttgtgatgaccctggaagaatcggcgtagcagcgtagcaccgctccattttggtcttaccctcacctccccatgctatgaactgatcaatttcattgttcttcatcacccttctcctagctttccacttccttcggatctcatgccatgtttctcagcatgaatcaaatttaattcgtgttttctacttccatatatactggaagaaatttaattagatctatttttgctcgggaggtcttcatactttgagttctgatgccatcaccttatttccccccccccyttctctkgktctatcttcttcctcatcttggcttgatcattttgatctgtcagttatagcatgatgcattctcaatttgactgtatgtaagttcaaccggaaatatgttgaatggattttctatatatcaacacttgatgtcaggcctgcatctgtttcgcttgtggtggtgtggccaaaattgtctatatttgatctttgctcttctttctcctcatttcatgacgattcctactacggcttaaaccattctttattctttactaatcatggatgttgcttgactcctagttgtttcgtactagctcaacttggagatcttttcattatttgcctagttggtgggtacgtttgtgacagatctaaaatggtgcacgaaaagttttacttattatgaaaaaagggagcttaacagggtaatttctctatttattcgtgatgacattttttccttgataagggggattttttataatctgcactcacatgtttatatgtaaaatctagctcttttgttttgtttttggcatatttcccgctaagtatagagtttatgtggataacattataacttttcaagatccaatccacatctttgattgtgaaaatcatacaatagggaaaatcaactgaagggttaattagatgctatatgcatatatatatatatgtgcgcgcgcgcgcgcctgaatttaactatgtatgcatccaactgtttcattgaaaaagatttgatatttttcagtctattctttttcgagtatatatttaatatgtttcaatctgttttgaccattataagataaagcctatattcaccaggcatttgagatgatcttttcatgcatgaaaaagctgttgttatcacttcaactaaccagacgatctaacatgtatttgtataagaaacagaccttgatttccttctgtaaaatcatgcatgtgttcgttttgaattggagtcggcgcgcctgtgttttgaccgtcaggaaagtcttttttttccctgaatagtcaagggtctatacttcttgaagcaattgggacactaatcaattattgtttatacctcggaccatcttttccttcttcacaccactaatcagtttatgccttggaccattaattgtgttgttcacaagcttcttgtttatggtttacaaagcattcgcctagatttgtgtgtgtctctacacatcgatcacttttaaatacttgtcgctttcagttattcttttaacgtttggttatttatcttatttaaaaaaattatcgtattattatttattttgtttgtgatttactttattatcaaaagtatttcaaatatgacttatctttttttataagtgcactaatttttcaaataagatgaatggtcaaatgttacaagaaaaagttaaagcaaccactaatttagggcggaggtagtaaaacctagttattgtaaccaataattttatcaatctataaatgcaacacaaagtcacttcgtgatatctcacacaaagccacttcaacgatgaaagctgactgcatgttttatcaaaacacatgtgatcagtttgttggatgaaaaaaattatctatgtcataaatcaagagttataatataagcttctggctctacaagtaacatttctatgttttttttttacgttcttacatactatgttttgccaaaaaaaacatgatcattttgttggacgaaaagaaatagtaaatatagagtgacctttgatatcattataatataagcttctgcctctataaataacatctatgcactttttacgtcgtagtaatttgatatatgagaaatttacatataacatttttgtgcagcataacaaagactttagaaaggtac

SEQ ID NO: 12 - DNA, 4457 bp, Oryza sativa
  misc_feature (1)..(4457): OsMADS6 5'-regulatory sequence
  misc_feature (1)..(12): Engineered sequence
  misc_feature (1)..(1478): 5'-nontranscribed sequence
  misc_feature (1479)..(1685): exon
  misc_feature (1503)..(1508): Engineered Sequence
  misc_feature (1529)..(1529): Mutagenized sequence position
  misc_feature (1686)..(4443): intron
  misc_feature (4444)..(4457): exon
  misc_feature (4450)..(4457): Engineered sequence
gcatgcggaccgctaggacgatggtgtgatgtgggaacacgaagaaaacatgaggaaaaaatattaaaatgaatttcccacttaaaatgcatcaaataaaaaaaataaagaaacgaccgggaatagacacagggtttgtgaactagctagggcaaacatcatatggtcccttgctgatgcacaagtacattgagatgtcatttcaattctgtgcatcatatgcatgtggtcccttgctgaatattactcttgaaatatctaccagtgccaatctattgcatgacttaattaattcacaggttttgttgattacattattagtaagcttgagagcacaagctcaatggatttttctataaatggggatcattttgcaattttctttgtcgtgcaaagttagccttctttattactacttctgtttttaaatatacgatcctattgacttttggtcatatatttaaccatgtatcttatttagatagtttgcgcaaatatatataccttcaatgataaaattagttacaatgaaacaaatgatatttacgcaattctttttactaaacaagtcacaagaagtacctgcagcaatatatgttggaaccgtgcagtagatcgagcctagctacgcaaaaaaacaaaaagagaaaaaaagggaaaggaaaaacattaatcatgcatgagcagtatgcccggcaactggaatttgtcaaagatatggggagaggagaataatacaagtactactactacctagctctaccatgcatatgcacccaaaggcaaactggattattggataaagcacagatgctggcaaaacaatccttaagcctcccctccctgcttctttatttttgggcagcctctaccggacggtgccgtggtccattggaccagtaggtggcgacatacatggtttgggttaagtctaggagagcagtgtgtgtgcgcgcgcaagagagagagactgtgagtctgggagtagccctctcccctcctttggccatcttcctcgtgtatatgcatatatgcatcatcgcaacggtgtatatttgtggtgtggcgggtgtggcattggattgcccccattttggctcgtgcttcccagttagggtaaaacctgtggtaaacttgctagccccacgccaaagttacccttctttattgttgaaagggagaggaggtgtgtgaattgtgatggagggagagagagagagagatagaaagagagatgtgtgtcaaagcaagcaagaaaccagtttcacaaagagctactactagtactagtgtactactgtggtacagtgcccaatgtcctttctccggactcgactccactaatattctcctcttctcgcgcggctcgttatattctcgtcatcattggaggctttagcaagcaagaagagaggcagtggtggtggtggtggaggaggagctagctagcctgtgcttgctgatcggtgctgagctgaggaatcgttcgatcgatcgggcgagtcgacgaggggaagagttgagctgaggcgcatcgagaacaagatcaacaggcaggtcaccttctccaagcgccgcaacggcctcctcaagaaggcctacgagctgtccgttctctgcgacgccgaggtcgcgctcatcatcttctccagccgcggcaagctctacgagttcggcagcgccgggtataattaatacagacacaacaacacacacaaccaacaaaccagcatcaatttgaacctgcagatctgctgttttctctgatcaattgcttctttttttttgttcttttttgtttcttttatctgctgcaacggcgtcctgctcctctggggtttctcgttttctttttcatttatttttagcaggtgccaagtagccgagctactatacttacctggccatgttaattattttattccgtctgtctgtgtgtgtctgtgcatactactatagggacatggcgcggtgttcttataaaccgggaggccggatccctaactagcatgggaggatatcttttcagcggatctatacaaaccctactcctgctgacctctttcttccagtttctccgggtcttccttggattattattgcccatcttccgggttgtgcgtgtgtcagagacagctcgaacgataaatttctcaaaaccagtactagagagggtgtgttgtgtgtgagaactgagtggagagttagcatgaaggctgcaaactagaaaggaaggtatgttctttcctttttgatccatcaggggagccccttctggtattaagatctttccggcacattgattttcatactttgtgatgaccctggaagaatcggcgtagcagcgtagcaccgctccattttggtcttaccctcacctccccatgctatgaactgatcaatttcattgttcttcatcacccttctcctagctttccacttccttcggatctcatgccatgtttctcagcatgaatcaaatttaattcgtgttttctacttccatatatactggaagaaatttaattagatctatttttgctcgggaggtcttcatactttgagttctgatgccatcaccttatttcccccccccccttctcttgttctatcttcttcctcatcttggcttgatcattttgatctgtcagttatagcatgatgcattctcaatttgactgtatgtaagttcaaccggaaatatgttgaatggattttctatatatcaacacttgatgtcaggcctgcatctgtttcgcttgtggtggtgtggccaaaattgtctatatttgatctttgctcttctttctcctcatttcatgacgattcctactacggcttaaaccattctttattctttactaatcatggatgttgcttgactcctagttgtttcgtactagctcaacttggagatcttttcattatttgcctagttggtgggtacgtttgtgacagatctaaaatggtgcacgaaaagttttacttattatgaaaaaagggagcttaacagggtaatttctctatttattcgtgatgacattttttccttgataagggggattttttataatctgcactcacatgtttatatgtaaaatctagctcttttgttttgtttttggcatatttcccgctaagtatagagtttatgtggataacattataacttttcaagatccaatccacatctttgattgtgaaaatcatacaatagggaaaatcaactgaagggttaattagatgctatatgcatatatatatatatgtgcgcgcgcgcgcgcctgaatttaactatgtatgcatccaactgtttcattgaaaaagatttgatatttttcagtctattctttttcgagtatatatttaatatgtttcaatctgttttgaccattataagataaagcctatattcaccaggcatttgagatgatcttttcatgcatgaaaaagctgttgttatcacttcaactaaccagacgatctaacatgtatttgtataagaaacagaccttgatttccttctgtaaaatcatgcatgtgttcgttttgaattggagtcggcgcgcctgtgttttgaccgtcaggaaagtcttttttttccctgaatagtcaagggtctatacttcttgaagcaattgggacactaatcaattattgtttatacctcggaccatcttttccttcttcacaccactaatcagtttatgccttggaccattaattgtgttgttcacaagcttcttgtttatggtttacaaagcattcgcctagatttgtgtgtgtctctacacatcgatcacttttaaatacttgtcgctttcagttattcttttaacgtttggttatttatcttatttaaaaaaattatcgtattattatttattttgtttgtgatttactttattatcaaaagtatttcaaatatgacttatctttttttataagtgcactaatttttcaaataagatgaatggtcaaatgttacaagaaaaagttaaagcaaccactaatttagggcggaggtagtaaaacctagttattgtaaccaataattttatcaatctataaatgcaacacaaagtcacttcgtgatatctcacacaaagccacttcaacgatgaaagctgactgcatgttttatcaaaacacatgtgatcagtttgttggatgaaaaaaattatctatgtcataaatcaagagttataatataagcttctggctctacaagtaacatttctatgttttttttttacgttcttacatactatgttttgccaaaaaaaacatgatcattttgttggacgaaaagaaatagtaaatatagagtgacctttgatatcattataatataagcttctgcctctataaataacatctatgcactttttacgtcgtagtaatttgatatatgagaaatttacatataacatttttgtgcagcataaccaccatgg

SEQ ID NO: 13 - DNA, 25 bp, Oryza sativa
  misc_feature (1)..(28): OsMADS6 5'-untranslated sequence
ggaatcgttcgatcgatcgggcgag

SEQ ID NO: 14 - DNA, 217 bp, Oryza sativa
  misc_feature (1)..(221): OsMADS6 5'-untranslated sequence - engineered
  misc_feature (25)..(30): Engineered sequence
  misc_feature (51)..(51): Mutagenized position
  misc_feature (214)..(221): Engineered sequence
ggaatcgttcgatcgatcgggcgagtcgacgaggggaagagttgagctgaggcgcatcgagaacaagatcaacaggcaggtcaccttctccaagcgccgcaacggcctcctcaagaaggcctacgagctgtccgttctctgcgacgccgaggtcgcgctcatcatcttctccagccgcggcaagctctacgagttcggcagcgccggcataaccacc

SEQ ID NO: 15 - DNA, 1241 bp, Oryza sativa
  misc_feature (1)..(1241): OsMADS6 3'-regulatory sequence
  misc_feature (1)..(257): 3'-untranslated sequence
  misc_feature (258)..(1241): 3'-non-transcribed sequence
gctaagcagccatcgatcagctgtcagaagttggagctaataataaaagggatgtggagtgggctacatgtatctcggatctctctgcgagccacctaatggtcttgcgtggccctttaatctgtatgtttttgtgtgtaagctactgctagctgtttgcaccttctgcgtccgtggttgtgtttccgtgctacctttttatgttttgatttggatcttgtttgaaaataatcttaccagctttgggtaaactgtttattacgtactctatatagcatatgtgaccgacgacaacggtttcattttagatgatgtgtatggatgatttctttccaaaatcacatctttagtataagagcaattttaccatccaataccaaattttatactagaaaatattttgggatatcaaaatttatggtacctccagtaccaaatgttgaatggtaaactttcataatatacaagtcactctaggatatttaagacaatttttagttttttcttattgttgcccttgttaaatacatgagaaattttacatcacttaaaatgtatcaagaggtatcaaatttttttaatacaaaatttagtactttctccgtttatatatgaatgtggacaatgcttgaaagtcttataacctgaaactgaggtagtgtatcgagaagtacaaaattttacactaaaatcccagtacttactcaataactgtaaaattactctaaatatgtactccctctatttcagattataagttgttttaactttagtcaaagttaaactgtttcaagtttaaccaagtttgtagataaaagtagtaacatattcaacacaagacaaatatattataaaaacatattgaattatagatttaattaaattaatttggtattgcaagtattactaaatttgtttataaatttggtcgaatttaaaatagtttgactttaaccaaagtcaaaacaaattataatctaaaacaaaggtaatacattgtatcactctcatgaatggattgtaacatacattaatttaattactattttagttcttgtgcaaaagttgaaaacgatttatgtttggaatctttttgtggtgtatatatatgaaaccattcctctaccatccttccccaaccataatcctcacaaccgttagccccattgtgatctcacccagttgctagcctcttttgtcaccttgtcacagctctcctccattcattacacaatggcatc

SEQ ID NO: 16 - DNA, 1293 bp, Oryza sativa
  misc_feature (1)..(1293): OsMADS6 3'- regulatory sequence engineered
  misc_feature (1)..(42): Engineered sequence
  misc_feature (1)..(299): 3'-untranslated sequence
  misc_feature (300)..(1293): 3'-nontranscribed sequence
  misc_feature (1283)..(1293): 3'-nontranscribed sequence
acgtgagctccgcgggcggccgcactagtcccacgtgagctcgctaagcagccatcgatcagctgtcagaagttggagctaataataaaagggatgtggagtgggctacatgtatctcggatctctctgcgagccacctaatggtcttgcgtggccctttaatctgtatgtttttgtgtgtaagctactgctagctgtttgcaccttctgcgtccgtggttgtgtttccgtgctacctttttatgttttgatttggatcttgtttgaaaataatcttaccagctttgggtaaactgtttattacgtactctatatagcatatgtgaccgacgacaacggtttcattttagatgatgtgtatggatgatttctttccaaaatcacatctttagtataagagcaattttaccatccaataccaaattttatactagaaaatattttgggatatcaaaatttatggtacctccagtaccaaatgttgaatggtaaactttcataatatacaagtcactctaggatatttaagacaatttttagttttttcttattgttgcccttgttaaatacatgagaaattttacatcacttaaaatgtatcaagaggtatcaaatttttttaatacaaaatttagtactttctccgtttatatatgaatgtggacaatgcttgaaagtcttataacctgaaactgaggtagtgtatcgagaagtacaaaattttacactaaaatcccagtacttactcaataactgtaaaattactctaaatatgtactccctctatttcagattataagtcgttttaactttagtcaaagttaaactgtttcaagtttaaccaagtttgtagataaaagtagtaacatattcaacacaagacaaatatattataaaaacatattgaattatagatttaattaaattaatttggtattgcaagtattactaaatttgtttataaatttggtcgaatttaaaatagtttgactttaaccaaagtcaaaacaaattataatctaaaacaaaggtaatacattgtatcactctcatgaatggattgtaacatacattaatttaattactattttagttcttgtgcaaaagttgaaaacgatttatgtttggaatctttttgtggtgtatatatatgaaaccattcctctaccatccttccccaaccataatcctcacaaccgttagccccattgtgatctcacccagttgctagcctcttttgtcaccttgtcacagctctcctccattcattacacaatggcatcggtccgcagt

SEQ ID NO: 17 - DNA, 1179 bp, Oryza sativa
  CDS (109)..(855): OsMADS8
gctttcccctctcttccgcttcgcgagattggttgattcatctcgcgattgatcgagctcgagcggcggtgaggtgaggtggaggaggaggaggaggaggagatcgggatggggagagggagggtggagctgaagaggatcgagaacaagatcaacaggcaggtgacgttcgcgaagcggaggaatgggctgctcaagaaggcgtacgagctctccgtgctctgcgacgccgaggtcgccctcatcatcttctccaaccgcggcaagctctacgagttctgcagcggccaaagcatgaccagaactttggaaagataccaaaaattcagttatggtgggccagatactgcaatacagaacaaggaaaatgagttagtgcaaagcagccgcaatgagtacctcaaactgaaggcacgggtggaaaatttacagaggacccaaaggaatcttcttggtgaagatcttgggacacttggcataaaagagctagagcagcttgagaaacaacttgattcatccttgaggcacattagatccacaaggacacagcatatgcttgatcagctcactgatctccagaggagggaacaaatgttgtgtgaagcaaataagtgcctcagaagaaaactggaggagagcaaccagttgcatggacaagtgtgggagcacggcgccaccctactcggctacgagcggcagtcgcctcatgccgtccagcaggtgccaccgcacggtggcaacggattcttccattccctggaagctgccgccgagcccaccttgcagatcgggtttactccagagcagatgaacaactcatgcgtgactgccttcatgccgacatggctaccctgaactcctgaaggccgatgcgacaaccaataaaaacggatgtgacgacacagatcaagtcgcaccattagattgatcttctcctacaagagtgagactagtaattccgcgtttgtgtgctagcgtgttgaaacttttctgatgtgatgcacgcacttttaattattattaagcgttcaaggactagtatgtggtataaaagcccgtacgtgacagcctatggttatatgctgcgcaaaaactacgtatggtacagtgcagtgcctgtacatttcataatttgcgggtaaagtttattgactatatatccagtgtgtcaaatataat

SEQ ID NO: 18 - protein, 248 aa, Oryza sativa
MGRGRVELKRIENKINRQVTFAKRRNGLLKKAYELSVLCDAEVALIIFSNRGKLYEFCSGQSMTRTLERYQKFSYGGPDTAIQNKENELVQSSRNEYLKLKARVENLQRTQRNLLGEDLGTLGIKELEQLEKQLDSSLRHIRSTRTQHMLDQLTDLQRREQMLCEANKCLRRKLEESNQLHGQVWEHGATLLGYERQSPHAVQQVPPHGGNGFFHSLEAAAEPTLQIGFTPEQMNNSCVTAFMPTWLP

SEQ ID NO: 19 - DNA, 5229 bp, Oryza sativa
  misc_feature (1)..(5229): OsMADS8 5'-regulatory sequence
  misc_feature (1)..(2303): 5'-nontranscribed sequence
  misc_feature (2304)..(2596): exon
  misc_feature (2597)..(5203): intron
  misc_feature (5204)..(5229): exon
ccattttttgcgaaatgccaaatcctggcatgcctaagctgacctgagcttgtagttttcaaacgaaccgtgttaattgtggtatataacacattgggttggctactgtatcgtacataattttgttggggttatttctgcatgcgtatacgtacggattagttgtaattaagaggaaaaacatgcatgtataatatagatatacctagcatgcaccattatatacttattaatctaagctttaaagtgcaaatgatactacatattgaacattcaactttattgtattgataaattgaaccggatatatccacaagcacaaaatttgcaatgcacttcaaaattaatgtaatctttgcacgctactccctacatttcatattataagttgatttgactttttttttcaagtttataaaaaaaattagcaacatctaaaatatcaaattagtttcacttaatctaacattgaatatatttagatactacgtttgttttatcttaaaaatgttagtatgttttttttataaacttggtcagcctttgaaatgttggactagaaaaaaaggtaaaaaaaattataatgctgaataagccacaatttaaaaagtttacagggacggtttaattcattgacatttcacatatacatagcacatgtcaaattcatatgttaacttttctttttataaactggacaccccgtgccaacagtcaacccctaattaaattaaccacaacatgaatacatcattaattttataacatatactagttattttgcttttcatatatctccccctcttgctaatttgagttcccagcatgcatggatactaattaacttaaccaaaattagttagcctgcagcctaatttgtccatctctagctagctagtttgcacttaacatctgtgatacgttaccacaccaaagttacatacacattaatgattaatcctttgatcagttcctatatatcccaggtagaatatatatcgatctcttcagaatcacgaccaattaggtaaaatgaaagaacatacactcctgcctagccaagacttcaaaccttacacacacatatatatctactactgcaagcactgcaacggcaaagttctctgcaggcaaagagatataccgatcgaagaagcctctctctatccaaacccaaacagctccattttgtctacacgaactatggcaacttggcaaccacatcgctagctagctagatatatactatgctaccttggttcattttgctgctttgatttgcaactgcaacccaagagaaaagttgtaagggtctgtatggggattttctgaccgctgtatcttctctcaaaatcatattaatcctctctacatagtctagtttttcatccaaattctcaaaagctctaattatagaatctaaaaaattaactagaaaacagaagctgagaaatccacattctccatattctcagaagcttgatactaactagctatttcccaaaatcttaggccttatttagttggggaaaatttttgggtttgtttgtcacattggatatacggacacacattagtattaaatgtggtacaataacaaaacaaattacagattccgtcaaaaaactgcaagacaaatttattgagctcaattaatccgtcattagcaaatgtttactgcagcaccacattgtcaaatcaggcgcaattagacttaaaagattcgtctcgtaatttacacgcaaattgtgtaactggttttttttccacatttaatactccatgcatgtatttaaatattcgatgtgatgggtgaaaattgtttattttggaaactaaacaaagccttaagctctcccaacagatcacccaccggctcctagtggacacaagaagggtatttttcccgaaacccgaaaactccgaggtttcaagtgcaaaagcgcccaactctactcacttttccccagcttttccgcgcttaatttctcgacctgtcgaatcctcagtcgccaccgctgcgtcgacgaggagagagagagagagagagagagagagagaaaatccaaagcaatcagtgagagacgcattgaattgggtcggagattagtgcgaaattaacctagatagctttgcctttgcgtacgatggatcgatcgaggccgcctagggttccgcgtcgttccaccaccttgccggaaatggcaatgccgggtagcccccaccgccgctgcccaccctctcccccttccctttttaaacccctcatccccttccccctcctcctcctcctcctcgccttagctttcccctctctttcgcttcgcgagattggttgattcatctcgcgattgatcgagctcgagcggcggtgaggtgaggtggaggaggaggaggaggaggagatcgggatggggagagggagggtggagctgaagaggatcgagaacaagatcaacaggcaggtgacgttcgcgaagcggaggaatgggctgctcaagaaggcgtacgagctctccgtgctctgcgacgccgaggtcgccctcatcatcttctccaaccgcggcaagctctacgagttctgcagcggccaaaggtatatatacatggacgcactgggcgcgcgcctcgatctgctatagctagatcggtagctgcttgcaacgtagctagctagggtttcttgcgcgcgcctgcgcctccagatctggagcgcacgatggttttgtgaacttcttggtggcgattttgcggggatctggggctgcacatggtggatctgcgagtgtgctcgtgttttggtgagttttgggagggtttgggagaaggaagttggtggaattctgtgggaataattagggtttttgttcgttcgatcgggtgctagctagcgtaatagggagtggtgaaatacgtagatctgagggtttctgatcccgtggtagtagtggttttgagatggcgcgcttaatggttttgagtttggtttaattgcgattaatttatgtgcatgcatgggatgggacattcaggatttaagcctggatcagcaagtcgatttttacggagaaaattaatcgttggaagcttcgaatcttaattttatcgatctcctaatggagggtatgcgagtttcgaattcccttgggatctgtttttttcctcaatttttagttttttgaggggcaattttttttagggtatatatgattttttttttttgggggggggggggtgtgtgaagggatcatgcatatcattagccatgtaccggatgtgtgtctaaacaaacgttcactgcatgaattccacggtttggaggcagcataccttacaagatttgggggtttcacttaagattttgtctctttgtttttttaagggatggccgcgggggagtattgtttttcaagtgagttatggttgcatcattaaaggcaacatcaataaatataaagtctgtttctcctgagataagtatatgaaaaatcatatactactatatatataattgtctttcagaaacacagagcgtctgattggctaggcataattcacaagccgcatataagctagttgaattgattttgaattagaaaacattttttttcggggggaagaaaacatttggtattgtgtttagagataaacaattagttagggtagataagtcaggcattcatgagcttcatttcatatttgaatcatacattttccaaactttagaaggttaaattttcttgctcattgtattgcactgatcattttaataatatcttctatagtgaatattacatcattatatattttagataatgattacattattatatgctccgttgcagaaaaaaccaacttttttgccaaacctggacatatataggctatgtccagatttatagctagaagttagggcctcatcttttaccctatgaattataagccaatatcaaattttgaatttcgaaacttgatttagaagttgatttttaatgttttgtcaatgtagattgtttttcagcattaacttttaattcgctaaagacacatatacaattttactcacaaattatattttggttgctaataagccgttatggcttataatcagccgtaagtatatggggactttagcattctttttctttttttatggagggagtacatgcttgccaatttttatagttatgtttaaatggtttccattatacctaagttactaaattaaaattaatacgcctataaaattctaacattaaatatattcacaaataagagtacatgatttcattgaccagggaattcaatttggatatggggtgagtgaaacatccctcctctgctcctcggaagaaatcctgcaagggagtacacaatattcctaggactcacttgagtatctgcagggtacagttagtgacagctttcgattgtcattcgattggtctcctcagctctcgtagctgagctgtcagtacagaagattggtcttcatcagatgtctcttctagttctagctagagctagttcagtggagtattttatgccgacaaattgatactcaacgtgtactgtagatccttttcagaaatctgaattcacgacttgtttaaacaaaggctgtgtttggatccaaacttcagtccttttccattacatcaacctgtcatatacacacaacattttagtcatatcatctccaatttcaaccaaaatctaaactttgcgttgaactaaacacagccaaaaggtcactaaattgacgcggtagaggggggggggtgagcattatagctgtagtagtagtctgcgtgaagttatgccatttcattgtgtgtcgtctgaacttgatatctctctttaaagagtgtactccattttctttacaaaaagtggcctctaggttgatatcatggacatatataaaattataaatcaacttgaaactaccgatgcaagaattaagataaaacgttattgtttcttagaaattgtctccaattatgcaagcaccttcatccgtgtcatggagctaatgttcatgttttgtgggaaacaagatttttcatctactaattaatcgatgtggtccccggaaaagaatgtgccctagattgttagtatttagttatgggcgaactatatatgttcctttatttcgtttttccataaacatagccatttgtgtttttgaaacttgcagcatgaccagaactttggaaagatacc

SEQ ID NO: 20 - DNA, 5226 bp, Oryza sativa
  misc_feature (1)..(5226): OsMADS8 5' regulatory sequence engineered
  misc_feature (1)..(15): Engineered sequence
  misc_feature (1)..(2315): 5'-nontranscribed sequence
  misc_feature (2316)..(2605): Exon
  misc_feature (2420)..(2425): Engineered sequence
  misc_feature (2606)..(5212): Intron
  misc_feature (5213)..(5226): Exon
  misc_feature (5214)..(5214): Mutagenized base pair
  misc_feature (5221)..(5226): Engineered Sequence
cctgcaggcggaccgttttttgcgaaatgccaaatcctggcatgcctaagctgacctgagcttgtagttttcaaacgaaccgtgttaattgtggtatataacacattgggttggctactgtatcgtacataattttgttggggttatttctgcatgcgtatacgtacggattagttgtaattaagaggaaaaacatgcatgtataatatagatatacctagcatgcaccattatatacttattaatctaagctttaaagtgcaaatgatactacatattgaacattcaactttattgtattgataaattgaaccggatatatccacaagcacaaaatttgcaatgcacttcaaaattaatgtaatctttgcacgctactccctacatttcatattataagttgatttgactttttttttcaagtttataaaaaaaattagcaacatctaaaatatcaaattagtttcacttaatctaacattgaatatatttagatactacgtttgttttatcttaaaaatgttagtatgttttttttataaacttggtcagcctttgaaatgttggactagaaaaaaaggtaaaaaaaattataatgctgaataagccacaatttaaaaagtttacagggacggtttaattcattgacatttcacatatacatagcacatgtcaaattcatatgttaacttttctttttataaactggacaccccgtgccaacagtcaacccctaattaaattaaccacaacatgaatacatcattaattttataacatatactagttattttgcttttcatatatctccccctcttgctaatttgagttcccagcatgcatggatactaattaacttaaccaaaattagttagcctgcagcctaatttgtccatctctagctagctagtttgcacttaacatctgtgatacgttaccacaccaaagttacatacacattaatgattaatcctttgatcagttcctatatatcccaggtagaatatatatcgatctcttcagaatcacgaccaattaggtaaaatgaaagaacatacactcctgcctagccaagacttcaaaccttacacacacatatatatctactactgcaagcactgcaacggcaaagttctctgcaggcaaagagatataccgatcgaagaagcctctctctatccaaacccaaacagctccattttgtctacacgaactatggcaacttggcaaccacatcgctagctagctagatatatactatgctaccttggttcattttgctgctttgatttgcaactgcaacccaagagaaaagttgtaagggtctgtatggggattttctgaccgctgtatcttctctcaaaatcatattaatcctctctacatagtctagtttttcatccaaattctcaaaagctctaattatagaatctaaaaaattaactagaaaacagaagctgagaaatccacattctccatattctcagaagcttgatactaactagctatttcccaaaatcttaggccttatttagttggggaaaatttttgggtttgtttgtcacattggatatacggacacacattagtattaaatgtggtacaataacaaaacaaattacagattccgtcaaaaaactgcaagacaaatttattgagctcaattaatccgtcattagcaaatgtttactgcagcaccacattgtcaaatcaggcgcaattagacttaaaagattcgtctcgtaatttacacgcaaattgtgtaactggttttttttccacatttaatactccatgcatgtatttaaatattcgatgtgatgggtgaaaattgtttattttggaaactaaacaaagccttaagctctcccaacagatcacccaccggctcctagtggacacaagaagggtatttttcccgaaacccgaaaactccgaggtttcaagtgcaaaagcgcccaactctactcacttttccccagcttttccgcgcttaatttctcgacctgtcgaatcctcagtcgccaccgctgcgtcgacgaggagagagagagagagagagagagagagagaaaatccaaagcaatcagtgagagacgcattgaattgggtcggagattagtgcgaaattaacctagatagctttgcctttgcgtacgatggatcgatcgaggccgcctagggttccgcgtcgttccaccaccttgccggaaatggcaatgccgggtagcccccaccgccgctgcccaccctctcccccttccctttttaaacccctcatccccttccccctcctcctcctcctcctcgccttagctttcccctctctttcgcttcgcgagattggttgattcatctcgcgattgatcgagctcgagcggcggtgaggtgaggtggaggaggaggaggaggagatcgggtcgacgagagggagggtggagctgaagaggatcgagaacaagatcaacaggcaggtgacgttcgcgaagcggaggaatgggctgctcaagaaggcgtacgagctctccgtgctctgcgacgccgaggtcgccctcatcatcttctccaaccgcggcaagctctacgagttctgcagcggccaaaggtatatatacatggacgcactgggcgcgcgcctcgatctgctatagctagatcggtagctgcttgcaacgtagctagctagggtttcttgcgcgcgcctgcgcctccagatctggagcgcacgatggttttgtgaacttcttggtggcgattttgcggggatctggggctgcacatggtggatctgcgagtgtgctcgtgttttggtgagttttgggagggtttgggagaaggaagttggtggaattctgtgggaataattagggtttttgttcgttcgatcgggtgctagctagcgtaatagggagtggtgaaatacgtagatctgagggtttctgatcccgtggtagtagtggttttgagatggcgcgcttaatggttttgagtttggtttaattgcgattaatttatgtgcatgcatgggatgggacattcaggatttaagcctggatcagcaagtcgatttttacggagaaaattaatcgttggaagcttcgaatcttaattttatcgatctcctaatggagggtatgcgagtttcgaattcccttgggatctgtttttttcctcaatttttagttttttgaggggcaattttttttagggtatatatgattttttttttttgggggggggggggtgtgtgaagggatcatgcatatcattagccatgtaccggatgtgtgtctaaacaaacgttcactgcatgaattccacggtttggaggcagcataccttacaagatttgggggtttcacttaagattttgtctctttgtttttttaagggatggccgcgggggagtattgtttttcaagtgagttatggttgcatcattaaaggcaacatcaataaatataaagtctgtttctcctgagataagtatatgaaaaatcatatactactatatatataattgtctttcagaaacacagagcgtctgattggctaggcataattcacaagccgcatataagctagttgaattgattttgaattagaaaacattttttttcggggggaagaaaacatttggtattgtgtttagagataaacaattagttagggtagataagtcaggcattcatgagcttcatttcatatttgaatcatacattttccaaactttagaaggttaaattttcttgctcattgtattgcactgatcattttaataatatcttctatagtgaatattacatcattatatattttagataatgattacattattatatgctccgttgcagaaaaaaccaacttttttgccaaacctggacatatataggctatgtccagatttatagctagaagttagggcctcatcttttaccctatgaattataagccaatatcaaattttgaatttcgaaacttgatttagaagttgatttttaatgttttgtcaatgtagattgtttttcagcattaacttttaattcgctaaagacacatatacaattttactcacaaattatattttggttgctaataagccgttatggcttataatcagccgtaagtatatggggactttagcattctttttctttttttatggagggagtacatgcttgccaatttttatagttatgtttaaatggtttccattatacctaagttactaaattaaaattaatacgcctataaaattctaacattaaatatattcacaaataagagtacatgatttcattgaccagggaattcaatttggatatggggtgagtgaaacatccctcctctgctcctcggaagaaatcctgcaagggagtacacaatattcctaggactcacttgagtatctgcagggtacagttagtgacagctttcgattgtcattcgattggtctcctcagctctcgtagctgagctgtcagtacagaagattggtcttcatcagatgtctcttctagttctagctagagctagttcagtggagtattttatgccgacaaattgatactcaacgtgtactgtagatccttttcagaaatctgaattcacgacttgtttaaacaaaggctgtgtttggatccaaacttcagtccttttccattacatcaacctgtcatatacacacaacattttagtcatatcatctccaatttcaaccaaaatctaaactttgcgttgaactaaacacagccaaaaggtcactaaattgacgcggtagaggggggggggtgagcattatagctgtagtagtagtctgcgtgaagttatgccatttcattgtgtgtcgtctgaacttgatatctctctttaaagagtgtactccattttctttacaaaaagtggcctctaggttgatatcatggacatatataaaattataaatcaacttgaaactaccgatgcaagaattaagataaaacgttattgtttcttagaaattgtctccaattatgcaagcaccttcatccgtgtcatggagctaatgttcatgttttgtgggaaacaagatttttcatctactaattaatcgatgtggtccccggaaaagaatgtgccctagattgttagtatttagttatgggcgaactatatatgttcctttatttcgtttttccataaacatagccatttgtgtttttgaaacttgcagcttgaccaccatgg

SEQ ID NO: 21 - DNA, 108 bp, Oryza sativa
  misc_feature (1)..(111): OsMADS8 5'-untranslated leader sequence - native
gctttcccctctcttccgcttcgcgagattggttgattcatctcgcgattgatcgagctcgagcggcggtgaggtgaggtggaggaggaggaggaggaggagatcggg

SEQ ID NO: 22 - DNA, 300 bp, Oryza sativa
  misc_feature (1)..(304): OsMADS8 5'-untranslated leader sequence - engineered
  misc_feature (105)..(110): Engineered sequence
  misc_feature (292)..(292): Mutagenized base pair
  misc_feature (299)..(300): Engineered sequence
gctttcccctctctttcgcttcgcgagattggttgattcatctcgcgattgatcgagctcgagcggcggtgaggtgaggtggaggaggaggaggaggagatcgggtcgacgagagggagggtggagctgaagaggatcgagaacaagatcaacaggcaggtgacgttcgcgaagcggaggaatgggctgctcaagaaggcgtacgagctctccgtgctctgcgacgccgaggtcgccctcatcatcttctccaaccgcggcaagctctacgagttctgcagcggccaaagcttgaccacc

SEQ ID NO: 23 - DNA, 2034 bp, Oryza sativa
  misc_feature (1)..(2034): OsMADS8 3'-regulatory sequence
  misc_feature (1)..(324): 3'-untranslated sequence
  misc_feature (325)..(2034): 3'-nontranscribed sequence
actcctgaaggccgatgcgacaaccaataaaaacggatgtgacgacacagatcaagtcgcaccattagattgatcttctcctacaagagtgagactagtaattccgtgtttgtgtgctagcgtgttgaaacttttctgatgtgatgcacgcacttttaattattattaagcgttcaaggactagtatgtggtataaaaggccgtacgtgacagcctatggttatatgctgcacaaaaactacgtatggtacagtgcagtgcctgtacatttcataatttgcggtaaagtttattgactatatatccagtgtgtcaaatataataaaatgtcgaggtttaattaccatgctcatgtgcattctaggttctttatatataggagtattaggttaactgattagttgttgtacatcattgtctaaaaaaatagctgtcgttgtacataaattgagcatgctggtctgcatgaaaattaaggaaaagaaacatgcaagtagcccaggtagttgggctgtcaagcagtcgtacttgtccgagtcgcagatagttagttgacccgaaactgtgattgcgaacgtacgagcgaaaatgtagatgcaggcatttcaacttgagtgatttgctttttattcatatatatggttcattttttttaaagatggcttcgactggatctcgtcttcgttaagcatgcgtccaggaccaggagtacatgcattttgcattcagccctaaccaatactttttaccaattaaagagcagagcaggcacgacacgcatagacaacggacatggatcttcgcagtactacatttgcagtagcagtggctgataggtgaacccgatcctacatgtcagtggctgctactgtagacaatctccactgatagacaacgggtacaactcgtagtattaattcaaacgccaaatgcattaatggtagtttgcttattagtactagtttgcataacgaagcgtgtatatatatttatacttcctccgttttatgttttaatttggacttgtcgttccagaaaatcgtacgaagtcatagcaaattacattgcaattcttcttaattacatattaatcatgttttcaaagtaagaattagaattccttataagagactactactagcatggttgtgttagagaaaggtaagaagaaaaaagcatttaaaaagtgatttggaatatgagaatgacaagtgttttggcataacttttaaatggtagaacgacaagtaatttaaaacatacaaagtactagtcccttcatttcatattataattcgcttcgactttttctaagtcaaacattgttaaatttgactaggttttatagaagaaaagtaacattttaaacgtcaaattagtttcattaaatctagcatttgaatatattttgataatatgtttgttttgtggtaaaaatactattatatttttctacaaatctagtcaaacgtaaaaaaaaagtttgactaggaaaaaagtcaaaacgatttataatataaaacataagagcacccgcaatagtaaagtaaggtgctctctgtaaaacatgtacatctcagcaatagactagattaatagtaaaccaccttaatagtatgtctacttgggtatctatagctctctaatatattgcctcgtttttctctatagactatcttcacattagtagatagctttgctctcttttttcatctcttccaagtaggaaaatatgctgacatggatctcttgtagagagtttatagataaccattgtgggtgccctaagtagtactatcttttcttcctgtccaaaaaatataaagcacttttgagcttctatacgtagatttaaatgagaaatggctatatttgattgagataagtgagtaggtaaacgctctatttaagataaattgtaaagttaatatattttgacggaggggaagtagcatttatgaaaccctagtagagctacgcttcgttgaccacactactcgaaataaacatgatattttgtcatgatcgatgact

SEQ ID NO: 24 - DNA, 2051 bp, Oryza sativa
  misc_feature (1)..(2051): OsMADS8 3'-regulatory sequence engineered
  misc_feature (1)..(8): Engineered sequence
  misc_feature (1)..(323): 3'-untranslated sequence
  misc_feature (324)..(2051): 3'-nontranscribed sequence
  misc_feature (2042)..(2047): Engineered sequence
gcggccgcaggccgatgcgacaaccaataaaaacggatgtgacgacacagatcaagtcgcaccattagattgatcttctcctacaagagtgagactagtaattccgtgtttgtgtgctagcgtgttgaaacttttctgatgtgatgcacgcacttttaattattattaagcgttcaaggactagtatgtggtataaaaggccgtacgtgacagcctatggttatatgctgcacaaaaactacgtatggtacagtgcagtgcctgtacatttcataatttgcggtaaagtttattgactatatatccagtgtgtcaaatataataaaatgtcgaggtttaattaccatgctcatgtgcattctaggttctttatatataggagtattaggttaactgattagttgttgtacatcattgtctaaaaaaatagctgtcgttgtacataaattgagcatgctggtctgcatgaaaattaaggaaaagaaacatgcaagtagcccaggtagttgggctgtcaagcagtcgtacttgtccgagtcgcagatagttagttgacccgaaactgtgattgcgaacgtacgagcgaaaatgtagatgcaggcatttcaacttgagtgatttgctttttattcatatatatggttcattttttttaaagatggcttcgactggatctcgtcttcgttaagcatgcgtccaggaccaggagtacatgcattttgcattcagccctaaccaatactttttaccaattaaagagcagagcaggcacgacacgcatagacaacggacatggatcttcgcagtactacatttgcagtagcagtggctgataggtgaacccgatcctacatgtcagtggctgctactgtagacaatctccactgatagacaacgggtacaactcgtagtattaattcaaacgccaaatgcattaatggtagtttgcttattagtactagtttgcataacgaagcgtgtatatatatttatacttcctccgttttatgttttaatttggacttgtcgttccagaaaatcgtacgaagtcatagcaaattacattgcaattcttcttaattacatattaatcatgttttcaaagtaagaattagaattccttataagagactactactagcatggttgtgttagagaaaggtaagaagaaaaaagcatttaaaaagtgatttggaatatgagaatgacaagtgttttggcataacttttaaatggtagaacgacaagtaatttaaaacatacaaagtactagtcccttcatttcatattataattcgcttcgactttttctaagtcaaacattgttaaatttgactaggttttatagaagaaaagtaacattttaaacgtcaaattagtttcattaaatctagcatttgaatatattttgataatatgtttgttttgtggtaaaaatactattatatttttctacaaatctagtcaaacgtaaaaaaaaagtttgactaggaaaaaagtcaaaacgatttataatataaaacataagagcacccgcaatagtaaagtaaggtgctctctgtaaaacatgtacatctcagcaatagactagattaatagtaaaccaccttaatagtatgtctacttgggtatctatagctctctaatatattgcctcgtttttctctatagactatcttcacattagtagatagctttgctctcttttttcatctcttccaagtaggaaaatatgctgacatggatctcttgtagagagtttatagataaccattgtgggtgccctaagtagtactatcttttcttcctgtccaaaaaatataaagcacttttgagcttctatacgtagatttaaatgagaaatggctatatttgattgagataagtgagtaggtaaacgctctatttaagataaattgtaaagttaatatattttgacggaggggaagtagcatttatgaaaccctagtagagctacgcttcgttgaccacactactcgaaataaacatgatattttgtcatgatcgatgactcggtccgcccgggacgt

SEQ ID NO: 25 - DNA, 1193 bp, Oryza sativa
  CDS (60)..(872): OsMADS13
gaagaagctagtttcctgcggccgacctcttgcttctcactttttgagagcaagaagacatggggaggggcaggattgagatcaagaggatcgagaacacgacaagccgccaggtgaccttctgcaagcgccgcaacgggcttctcaagaaggcgtatgagctctccgtcctctgcgatgccgaggtggctctcatcgtcttctccagccgtggccgcctctacgagtactccaacaacaacaatgtgaaggctacaattgacaggtacaagaaggcgcatgcttgtggctcaacttctggtgcacctctcatagaggtcaatgctcagcaatactaccagcaggagtctgccaaactgcgccaccagattcagatgctgcaaaacaccaacaagcacctggttggcgataatgtgagcaacctgtcactgaaggagctgaagcaacttgaaagccgcctggagaaaggcattgcaaagatcagagccaggaagaatgaactgctggcttcagagatcaattacatggccaaaagggagattgagcttcagaacgacaacatggacctcagaaccaagattgctgaggaggagcagcagctgcagcaggtgacggtggcccggtcggccgccatggagctgcaggctgcggcggcggcgcagcagcagcagcagaatccgttcgcggtggcggcggcgcagttggacatgaagtgcttcttcccgttgaacctgttcgaggcggcggcgcaggtgcaggccgtggcggcgcagcgccagcagatcatccccaccgagctcaacctcggctaccaccaccacctcgccattcccggcgccaccgccgccgacgcgccgcctcctcacttctgaacctcatgaacttcattttgcaccggcctgctgccatggatatgatgatcagctcatcttctatatcttatgctgttatgcagacagacactgatgtggctatatatatagtatttgtgtgctgctgcattttgttaatcccttataaattgctacttaattatctcatggagaattggagagaccaaatgggcagagctagctagttagctgtgcccaattaagaagctaaatctatcagaagtgtgtactgatgagtgatgagtatttttcttcatttgggatcaaattaaactaagtaaaacatatatattgactaaa

SEQ ID NO: 26 - protein, 270 aa, Oryza sativa
MGRGRIEIKRIENTTSRQVTFCKRRNGLLKKAYELSVLCDAEVALIVFSSRGRLYEYSNNNNVKATIDRYKKAHACGSTSGAPLIEVNAQQYYQQESAKLRHQIQMLQNTNKHLVGDNVSNLSLKELKQLESRLEKGIAKIRARKNELLASEINYMAKREIELQNDNMDLRTKIAEEEQQLQQVTVARSAAMELQAAAAAQQQQQNPFAVAAAQLDMKCFFPLNLFEAAAQVQAVAAQRQQIIPTELNLGYHHHLAIPGATAADAPPPHF

SEQ ID NO: 27 - DNA, 1901 bp, Oryza sativa
  misc_feature (1)..(1900): OsMADS13 5'-regulatory sequence
  misc_feature (1)..(931): 5'-nontranscribed sequence
  misc_feature (932)..(973): exon
  misc_feature (973)..(1881): Intron
  misc_feature (1882)..(1900): Exon
ttccaaaattaagcacacacatttgcaagaactagctaggcatgcatatatgataattaaccggcaagttgacttcagttattctgcagatgtactaaacacataacaagggatgatcagttgcttatttttttcataacttgctaggttgcttataactccagccttctggacatcgaccaatctctaaacatactttagcagtgcctacaaagtacaaacaactaaatacctctctgcagatcagtgtttctaggcacaaattacacaagatagaaaaaaggagaggttataaattcttgcttaaagaatatacatgtaaagatgtctaaatagctataaatgggtaagcaagatagcaaagaaggccagtggcctttgcagctaagctagctagctagcccttcttcctctctttcctgctttccctttgccttctcctattaatcctctgcacctcacacagcagcagaaaacccaccaactggagctctcctttcctactccaagaaacgaaggtagagaaagaaagatcagatcagcttcaggaccaattttagctaggttatatatctctttgcgtgctaatgtgttttagttatctgggtgtgtgtagagttctttgttaaggcactgattcagctgcagtttagattcaagtttgtatgttctctctttgaggaaaagaaacccttttcctgtgcttcgagttcttgcaaagagaaactgtgatgcttggcttccagtttgatgcttctttgttcagattggaaattcttcctagcttctttctctatttatgtagcaaggattctttccggcccagtgatcctggtttcttttggaaggtttcagttttttcgttctttcttgaaatttctcttcttgccttaggcagatctttgatcttgtgaggagacaggagaaaaggaagaagctagtttcctgcggccgacctcttgcttctcactttgtgatgagttttctttggtcaattcttagctagatatgttaagatagttagttaagcaaatcgaaattgctagcttttccatgctttcttaaacatgattcttcagatttggttggttcttttttttcctttttgtggagacgtgctgttcttgcatcttatccttcttgattcatctacccatctggttctttgagctttctttttcgcttcttcccttcattatttcgagcaatctctgcacatctgaaagttttgtttcttgagactacttttgctagatcttgtttactcgatcactctatacttgcatctaggctcctttctaaataggcgatgattgagctttgcttatgtcaaatgatgggatagatattgtccccagtctccaaatttgatccatatccgccaagtctttcatcatctttttctttcttttttatgagcaaaaatcatctttttctttcaaagttcagcttttttctcttgttttacccctctttagctatagctggtttcttattccttttggatttacatgtataaaacatgcttgaatttgttagatcgatcactttatacacatactatgtgaatcacgatctcagatctctcagtatagttgaattcattaatttcttagatcgatcagcgtgtgatgtagtactgtaaatcactactagatctttcatcagtctcttttctgcatctatcaatttctcatgcaagttttagttgtttctttaatccggtctctctctcttttttaatcagctgagagtttgtgctgttctttaatcattaccagatctttcatcagtactctctcttctgcatctatcaaacttctcatgcaatgtttttgctgttctttgatctgatctctggtctccttttttgttgatcagttgagagcaagaagccatgg

SEQ ID NO: 28 - DNA, 1913 bp, Oryza sativa
  misc_feature (1)..(1913): OsMADS13 5'-regulatory sequence engineered
  misc_feature (1)..(12): Engineered sequence
  misc_feature (1)..(942): 5'-non-transcribed sequence
  misc_feature (943)..(985): Exon
  misc_feature (986)..(1893): Intron
  misc_feature (1894)..(1913): Exon
  misc_feature (1908)..(1913): Engineered sequence
gcatgcggaccgttccaaaattaagcacacacatttgcaagaactagctaggcatgcatatatgataattaaccggcaagttgacttcagttattctgcagatgtactaaacacataacaagggatgatcagttgcttatttttttcataacttgctaggttgcttataactccagccttctggacatcgaccaatctctaaacatactttagcagtgcctacaaagtacaaacaactaaatacctctctgcagatcagtgtttctaggcacaaattacacaagatagaaaaaaggagaggttataaattcttgcttaaagaatatacatgtaaagatgtctaaatagctataaatgggtaagcaagatagcaaagaaggccagtggcctttgcagctaagctagctagctagcccttcttcctctctttcctgctttccctttgccttctcctattaatcctctgcacctcacacagcagcagaaaacccaccaactggagctctcctttcctactccaagaaacgaaggtagagaaagaaagatcagatcagcttcaggaccaattttagctaggttatatatctctttgcgtgctaatgtgttttagttatctgggtgtgtgtagagttctttgttaaggcactgattcagctgcagtttagattcaagtttgtatgttctctctttgaggaaaagaaacccttttcctgtgcttcgagttcttgcaaagagaaactgtgatgcttggcttccagtttgatgcttctttgttcagattggaaattcttcctagcttctttctctatttatgtagcaaggattctttccggcccagtgatcctggtttcttttggaaggtttcagttttttcgttctttcttgaaatttctcttcttgccttaggcagatctttgatcttgtgaggagacaggagaaaaggaagaagctagtttcctgcggccgacctcttgcttctcactttgtgatgagttttctttggtcaattcttagctagatatgttaagatagttagttaagcaaatcgaaattgctagcttttccatgctttcttaaacatgattcttcagatttggttggttcttttttttcctttttgtggagacgtgctgttcttgcatcttatccttcttgattcatctacccatctggttctttgagctttctttttcgcttcttcccttcattatttcgagcaatctctgcacatctgaaagttttgtttcttgagactacttttgctagatcttgtttactcgatcactctatacttgcatctaggctcctttctaaataggcgatgattgagctttgcttatgtcaaatgatgggatagatattgtccccagtctccaaatttgatccatatccgccaagtctttcatcatctttttctttcttttttatgagcaaaaatcatctttttctttcaaagttcagcttttttctcttgttttacccctctttagctatagctggtttcttattccttttggatttacatgtataaaacatgcttgaatttgttagatcgatcactttatacacatactatgtgaatcacgatctcagatctctcagtatagttgaattcattaatttcttagatcgatcagcgtgtgatgtagtactgtaaatcactactagatctttcatcagtctcttttctgcatctatcaatttctcatgcaagttttagttgtttctttaatccggtctctctctcttttttaatcagctgagagtttgtgctgttctttaatcattaccagatctttcatcagtactctctcttctgcatctatcaaacttctcatgcaatgtttttgctgttctttgatctgatctctggtctccttttttgttgatcagttgagagcaagaagccatgg

SEQ ID NO: 29 - DNA, 1186 bp, Oryza sativa
  misc_feature (1)..(1186): OsMADS13 3'-regulatory sequence
  misc_feature (1)..(335): 3'-untranslated sequence
  misc_feature (336)..(1186): 3'-nontranscribed sequence
ccgcctcctcacttctgaacctcatgaacttcattctgcaccggcctgctgccatggatatgatgatcagctcatcttctatatcttatgctgttatgcagacagacactactgatgtggctatatatatagtatttgtgtgctgctgcattttgttaatcccttataaattgctacttaattatctcatggagaattggagagaccaaatgggcagagctagctagttagctgtgcccaattaagaagctaaatctatcagaagtgtgtactgatgagtgatgagtatttttcttcatttgggatcaaattaaactaagtaaaacatatatatttgacttatgttttacgtgcatgcatgcatgcttaattgtgtcacctttggggattcattttgtacatatgtgcaccattttgtgtgtacaatgcaggtttatatgacttttttcgcaattacacgatggcccatgcacataaccaccatgcacactgcacgtacatccacaagtgtgcccctttaacacaaggcaatacaccaaataaattgtaatgtgccactaaacttttttgaaagtgtaaccgcgcgtatgcttccgtggcttatatatgactctggtggctgacttctagggcatgtcgacctgagcatcttcgtgtgggtttcgactctctaattctcctggtctctggcagttgtggaaggggcgaaactccagggtttttgattactctctttcctcactctcaagggttctgaaagtcatcctacaggaagaccgtttgtggtcttctgctggcgtcgctgtttttaggggtttattaggagtgtagtggagcttcgccaccaccctccatctatttaggagcaacatttttttggtagttttttactttagcagtctttttgtttctttctttgttcccttatccacatgcaatggtcgtctgactggttacgttgtgtaacaaaaactctgcttttttctaatatactgacgtgcaatcctttggtgcgttcgcgaaaagaaagggggatcaattgcaagtattttgtgggaattaaacttttcttgtgaaattattgtaaaattccagcattctaaatgagctctaatgtgtgataatttgcattctctatatatattgaataattcttttgttgactagttgggtgcccgtgcgttgc

SEQ ID NO: 30 - DNA, 1161 bp, Oryza sativa
  misc_feature (1)..(1161): OsMADS13 3'-regulatory sequence engineered
  misc_feature (1)..(8): Engineered sequence
  misc_feature (1)..(294): 3'-untranslated sequence
  misc_feature (295)..(1161): 3'-nontranscribed sequence
  misc_feature (1145)..(1161): Engineered sequence
gcggccgctgacatggatatgatgatcagctcatcttctatatcttatgctgttatgcagacagacactactgatgtggctatatatatagtatttgtgtgctgctgcattttgttaatcccttataaattgctacttaattatctcatggagaattggagagaccaaatgggcagagctagctagttagctgtgcccaattaagaagctaaatctatcagaagtgtgtactgatgagtgatgagtatttttcttcatttgggatcaaattaaactaagtaaaacatatatatttgacttatgttttacgtgcatgcatgcatgcttaattgtgtcacctttggggattcattttgtacatatgtgcaccattttgtgtgtacaatgcaggtttatatgacttttttcgcaattacacgatggcccatgcacataaccaccatgcacactgcacgtacatccacaagtgtgcccctttaacacaaggcaatacaccaaataaattgtaatgtgccactaaacttttttgaaagtgtaaccgcgcgtatgcttccgtggcttatatatgactctggtggctgacttctagggcatgtcgacctgagcatcttcgtgtgggtttcgactctctaattctcctggtctctggcagttgtggaaggggcgaaactccagggtttttgattactctctttcctcactctcaagggttctgaaagtcatcctacaggaagaccgtttgtggtcttctgctggcgtcgctgtttttaggggtttattaggagtgtagtggagcttcgccaccaccctccatctatttaggagcaacatttttttggtagttttttactttagcagtctttttgtttctttctttgttcccttatccacatgcaatggtcgtctgactggttacgttgtgtaacaaaaactctgcttttttctaatatactgacgtgcaatcctttggtgcgttcgcgaaaagaaagggggatcaattgcaagtattttgtgggaattaaacttttcttgtgaaattattgtaaaattccagcattctaaatgagctctaatgtgtgataatttgcattctctatatatattgaataattcttttgttgactagttgggtgcccgtgcgttgcggaccgatcgatacgt

SEQ ID NO: 31 - DNA, 4617 bp, Oryza sativa
  misc_feature (1)..(4617): AB00322 5' regulatory sequence
  misc_feature (1)..(2183): 5' nontranscribed sequence
  misc_feature (2184)..(2457): 5' UTR
  misc_feature (2458)..(4604): Intron
  misc_feature (4605)..(4617): Exon
cgttgcccagcgaggagcatgcgtaaaatccgcccaagctggtgcttgttgttgccgcgacccatgacggcatccgattctagtattacatgcttgccggcgttatcgagcacacaacgatgttccccgtcgacaccctcaagatgaacatgcaggtcggtgccccaccctgttactcggtcctgtcattggaggccgccttgtctggctaagtagtggacacatgttagccaacatgaacaatagatgacaatatggatgacgccgtgtgcattggtttgagtccaagcatggaaggtggtgtgatgtgaaagttaatttgtcatccctcggtgcaaagcgaaggtatatatgaaaccgggtgtaaagggaaaacaaaataaatctacccgatgttaagtgcaatttactctttatttatttttacttatttgattatgctgtaaccgagttggatggcaaaccacgtatggtgtgatagatttacttccaccattatcctcctttttatctcctacatatgtgtttacagttcgcttatagtatgctgttgtatatgctctcactgcaaactataattaattaacctgaaaaatataacaaaggtcctttcagattgctgccgagtctaagggctcattcggaatgtaggattgaaaaaaatataggaataggaaaaatataggaataggataggaatgcaagtgtaaaacagatgatttgaaaacataggaatttcatgtgaataggtgtggatggagtaaaggaaaaacataggaatctttagaagaaaataggtgcactattacaaaattatcacatactactagtgaattaaacaacattaatcaacctaataatgtgctttagttgcttgatggcatgatttgcctcgttcccacgcgaagggagagaaaaaagaggtcagcatggatgtttttcttcctatgatcttccagtgatatggctagcgtaggaaatttctctatgtatttcctacgaacattttcatgtgatccaaatgacgccacagtaaagcaatccataggaacccaaatccttcatttttcctgtgtttctcctctattctgaacaagccctaaagaaattcaaggaggcacctgaacgccggccaattagtgccagcgcaaacagccgatcgctgagaaaatgtgaataaggcaaagcgcgaactctggaaagcgctcgagagaggtcggccggcgacccaacaacacaccaccaccggcctcgcgcccgcggcgcacacaagatcgccacagcgccgtggtcggaacagcgaatccggccgcctgcaggcacaggcggcagtgccacctccccacccccccaatccgctgcgtttccctctggcctcgtcccttcccaacaaacaaacccgccaccacacggcgcccagcgcccgtgctctcctctcctctcctctacccgcccagcccagccgcccatcccccctcctttccgcggtccttttgctcggttcagcacgcacgcgggcacgcggcacgccatcaccgcgcggccggccgcctgctgctgctacagccagtggagtactgttctgggccggccgcgccgcccgaagccaccaccctttccttttccggaagcctccccaatcctccgccattccccgcatagcgccccatgcccctaccgaccatagcctcccaatcccccatcgcctagctgcttcgccgtttattttaagatttttctttgggttgtgagtaaggcttggtggggcccagctcacggttccttctggcataaacaatgacttgggcctgcccgccccgtggcctcgccatccgacactgtgcctctcatcccgcgattagtatatttttgctgtttttttatgggtgaaaaactgtgtgggctctctcgttgggttgctatccgtccacccgtccattcatcctcgcctttgccagttgcggtgttgcccccctcgctttatttatgtcgacctgccaataggagcaagtccccgtctcgagacaccagccgcgccgcgcctcgcctcgcctcgcctcacctcacctcacctcaccctccgcctcgtctccttcccccctttcctctacccacgcacgccctctctcccatcccagccgtagccgcgccgtgacttgtctcgatcggcggcgaggaggagggcttccgttccctggccggtgggggaggatcaggcgggggggcggcggggagggggaggagatcggtctcggtcgatccgcgcgcggcggcgatggcgcgggagaggcgggagataaagaggatagagagcgcggcggcgcggcaggtcaccttctccaagcgccggcgcggcctgttcaagaaggccgaggagctctccgtgctctgcgacgccgacgtcgcgctcatcgtcttctcctccacggggaagctatcccacttcgcaagctccaggtatgctgttctactcccacgcctggatatctctcgactccgcttcgtctcccgcgtttcgatagatctagctaggcgcgtttcctcccccggtctccctttgacttcgatgtctaagatccatccgcctgggctagggtttaacacgggatattttaactagtaacacggatctcaccatttccacccgttcagaaaaatcaatacagttttagaacgactcgtggttactttcgccccctttagatgtaggggatttactgtagtgtatgtagtctgcacctgtacttttgcagattattttcgaggtgttctttttttggtgcatgagtagcccatcttatttggccattcctactggaaatatcgtacgacaactcctgttatttgctgtttatgtgcgcgtggagttaatcgatgtgtgtgtcgcagtagtgctgtgttggtgataaagctagctagctctgctgatagcctacggtcgtacgtgtgattttatgtgctgatgcgtcgcgttttaccctctgatcaatggggggtctcgtgttttgtgcacggaaaacctcgcttcctgttgttgttttcttttgcaatgtgttaaatcattgcagaactgttgtttgatgagaaatatcctgttgttgttttcttttgcaatgtgttaaatcattgcagagctgttgtttgatgagaaatatcctgttgttgttttcttttgcaatgtgttaaatcattgcagagctgttgtttgatgagaaatatggtagtctcctacacgtatcgttcgtcatatccatctcgccttatttgaggacaatgctttcctcattgcaatcccttttctgcgccttaattaggtattatactgttatgctgtatcgctatatgtatttacatcgtgctgttcagtcttgtttgcagctgtacaatatgagtttgtttatgatatactcgccctttaatttgttactcatgataacaaactgaaataatttactcatagatctttatcttgcatgtatccatttcgaaaagtttcctttgtcttaataaaagaaatgttgtactagtacatatctcattatatcttcatgtacctgtccatcacttcatcgtcactatatatatatatatatatatatatatatatatatatatatatacaaacaaacaaaaatggtgttagctagaattctcttttgctgagaaagtatcttaattattatttcaggtttgttaatttgcatcaatttataataccttaacttcttttacttcaaacagggattttgttaaacaattgcaatttgttttatgtaaatttaagtacatcatttttcatttcttcgatgaatgtagattatctcagataagataacctgatacttcctttactcttctacatatgaatttgtttagttcatatcatatataaaagaatggacggagtatgttttttatggttttacatcagttgtcagtagcacaacttaagcaaggattcaacttctcttgatgtacttttttagaaatgtgcacatatacaacttaatttcatccatggtacaatttatttttagttcatttctacaaactagagttaagtgttggaagaagataaagaataaactgggatggctggtactgttatatgtggacaatcattcagccttggtagcatttaaatatgttcattttacctggtagtgagtactggtagaatccataaatcgtgcttctatcaataaaaaatcacactctataatattaattcaattttggagctgcaaggcttggtttatctaagaagttactatttataaactaacatttgtcttgattatttgttctacagctggacaatgtattgatccttcttctacattggatgccataagattttcttactgttttctttttcagtgcttaattcctatatttctgtcaatatcaacttacccgtgttaatttgaccagggaaaaccactttcatttctcaagattactcctgcaatgttatagacttgtagtctacttggcccgtgcctttataattatgaacattcatgtataatttatgttctattttcgttttatctgatggtctgtggcctactgtggtattgatgatgccttctgttggacagtatgaatgaaatc

SEQ ID NO: 32 - DNA, 934 bp, Oryza sativa
  misc_feature (1)..(934): AB003322 3' regulatory sequence
  misc_feature (1)..(323): 3' UTR
  misc_feature (324)..(934): 3' nontranscribed sequence
taactgaaaggaaaaaaaaagcatccttgcagatctggttggagtcgttgcggcatccaggggagaaacgcttgtgttattcccaaacccagactgcaataatataatcttgcgttggaagcgagatcagttaacctgatttatcatccttgtggctgcatgatgcgatgttccgcttgtactgttcgctaggatcttgactaaactttgagatctatgtgccgtttaattatcccatcgctattggcactccttatgcgatacatcatatatgcactttgttgctatcttaattatgatgcgtcttttgcagcgttctaagtatgatcttgcgctatcttttgcgctatcttgcattcttgcgtaatatatatacattgtcgctgtcgttagatttcagttcttagctagcagccactagttggtgttaatagcttttccttttcctttcccttttcttttcatgatttacctgtcacgctatttcgcgggctgcaatttgttgcttgagatatgctctgcatggaagaacactatgcagatgcgctccagcattgattttcattatgggatactaacggggtatatgttgctgtgtgctacagatgtacagcgacgcagcagaaaaggtgacagctgcagtatatgtactgatctttccatttaatattaaaaaatctatatctttccgtttgctcgcatatccttctattttggattaagagcctcaccgtttgacttatctgcggaataagctaaataatatgtgttcttagcgatgtaaaagcaaaggctaaaaaaattaatgtcgatgaaaaaaccttaaaatcggcttcaaatttaaggttaaaaatttagattttggttaataagtataagcataagtgaaaagataagaccgtaaatggttggatttcagttgccagatttattc

SEQ ID NO: 33 - DNA, 4781 bp, Oryza sativa
  misc_feature (1)..(4781): AB003324 5'-regulatory sequence
  misc_feature (1)..(1988): 5'-nontranscribed sequence
  misc_feature (1989)..(2432): 5'-UTR
  misc_feature (2433)..(2763): intron
  misc_feature (2764)..(4781): partial exon
tctaaatagggcccaacatactcaaggctttggaatattactcacacacacacacacacaaattcatgtgggtcaaatagcttgtcctttagaattttggaatttcccccattctccaactagaatatccaatgaaattattgcgtttaaaagaaagagttgggcggtgacgatatggggttttatcaactttcaaaatgaacacctatgaaatttctacttaacctcaacttcaatatgagaaatgtaaagtaaaaggaaaaattttctacaaaacatctaaaaaacatgatctttgctggtggacaccgttaaaaatgtagcttttgtcttagggcactaaaaaacgtgataatttgctggagaacatcacggcctttaaaatgtaaaatccacttaattgagaagagatgaggcatatgaaatgtttattttgccctcctcttcttcctcgccactcatgtcatcgcctcgctgcctgctaataggggtttgagtgagagagcacaaagattgagaggcggggatatgatcagttcgaactgagacatactccttcgttcacatatgcgggataggggcctcctaaaatatttttctatcaaataggatgaaaacaataaaataatcgatgtttatgttcttcagcaaattaccatatttttatagtgttctcggaaaatccacgttttgatttagatatactgtagcaaatttgccaaattaaaactaaccggtttaattaattttaggttttagcaagtactgtacgctcttcaagttgtggcaactactttgattgcagctacagtacaccccccgatcgagagcgagaccgagggttacgtggtgggcccagcgcggcagccacactgtaggagtgacagtgctaggctacagctactgtgctgggcgtagtagttgttccgctcactgtgcagatgagctcatgcgctcatcgatccccctcctctcctcctcctcctctctgtcctctgccatcccccccacccgtcacgtgaggcgacgccgccgacctgatggctcgacatgccccccgtcccggtcgacgcgacgtgcactgtgaccggccggaagaacgccccccctgccagccggcgacacgcacgcgtccggccatggctgcctagctagcgtatcgctcccccagctaccggcctcgccgtgtggcccggcgccccggcgtgcgtacgcgtcgggtacgtaggaaacacggcggcagcgtcgaggcgaggacggggaagcggctggaccggcgggccgggggaagagaggcagccatcctgtactctcctacgtacagccaccttacctgttgcgtcaacgagagcttgggcgttgctcgctacagccgctggctagcttagcttatagctagtctccgcttagcctgtgggcataaaagcacccggcaccagcgtccgctcgacacgtcgcgattccgcctctgtgcgcgctgctgcccgggccgcaccgtgtgatacgtacacaacctcgggttcgacgcccccgccggcccggtcgcttccctcgcctcgctgttaacgtcgctgttacaagcttgcgaattgcgattgtgcgagcgctcgcggcggtattaatttttgctatacctggggcgatggaaacgtaacgtactactactacgtgacctagggtgagagacgagacgagacgagaatatgagatgagatccaaattcaatctgcctctctaccccacgaaagaaaagattcttctcttcgtcgacgacccggcctctcgctctcgttgcctttctttcgcgctcagtctctctcggccaattaagctgtagatcggccaccaccaccaccaccaccaccaccatccacagggcgctgcaagctgggccaggcctctctctatctctctctcttgagaggagagattaagtagggcatagagagaaaaaagctactcctaattaagccacagcttgagcagatcagctgcaggccggccggtgtgcgtgtgtgacagtaggagagagagctagcgagagagagcaaggaatcggaattgatttcatgcactgatcgatccatccatcatgcagatgctgcatggatgagaagagctagcagctaagctttgctgaagaaaattcttcagaggtttgtgttgatttgctggtctgctagagatcgatctagagagagagagaggaagggaagactgaagagagatctcgagcgggagatcgagatggggcgaggcaaggtggtgcttcagcggatcgagaacaagatcagccggcaggtgacgttcgccaagcggcggaacggcctgctcaagaaggcctacgagctctccatcctctgcgacgccgaggtcgccctcgtcctcttctcccacgccggccgcctctaccagttctcctcctcatccaagtaaacccactgcccctctcactcatctcagcttcctcctcttcccctaatcaaattctctcaacttgcttaacctgcactccccaaaccgcaatttgctccatctttgcgcgcacaatctgcaagaaatcacgaccgatctgaattttctcgcgcgtgtactgtatccgtcgtcgtccgtgcatgaacttatgggaggggccatgatttcgtacgtgttgttttttctacgcctgttcctttctttctgttctattgggcgaagctactgttcatgtaaaaaaggctacaaaagaacaaggcaaagaagacgaggttgtcctcggcaggagatccagacatgtacatatatgcgtatatataccgtgtgtgtatatatgtatgtgtgtcatagcaggcaagaaaaattaagaaaggggtttcatttgatgtaaatatcatggcgtgtacaaatgctagaatctgaattagcctaaaatttggaggatttaacttgatggagtttaaataatttacttggaagaatgccacttttagtactagctgttgatgagcaaaatttgctgaagaatgccgcttttgatcaaaatttgtcgtttacttatatattatcaaggatacttttgtgtgttaattataaacttgctgcaataaatatctcatgaacacaacacactagttaaactcaccaacatcgtcatgtgttaattcatctacggcttggaacttgcaagaactactttaacgtacaagctctgactttgtatatctgacagtaccaaaatactgttaccttatagctacgttggaaaagatcaactgtacaactactttcagctctataaaacaattcactgtaggcaaatgcaccgtccatatatatagacactctgtgaggtagaattgctaatttatagtatattattatattaacgtgtaattgacccatacaggataatcttcaaatttggggcagtttgcatgaaatgtggaactcacattagcaaaaattgcatattaaagaatacactgaccatgttaatatacatgctagtgagttatagtttgtatggggatgctaatatgttttggcctttttccccatatgaatgtatgctacattcttacaattaatatatacgttacaaagggaaatcaaatgacctagtagtttctattactgaattattgcacatttagtttttccaatcaatcactaaattgccataagggtccagtttttttgtctgtttcttgttggttctttgtcaagtatcatatatatatgtaccatatttttgtaggaatatgcattcgcgctagctaccgtatgatgatcacacaggtttcaacccttggttaacactgttaatttgttgttataaggggtatcatccatagagacagattactgtatttgaataagagatttctgtataataatgctatgccgttattggttctttatcaagtgccacagtaccttgtttttgtagtatatgtgttcactagctaccatgtgatgatcacacaaagtttcaccgttggtgaactgttaatttgtcatatgtgacatgcatcatccatagatacacgtttctcatattaataatttttaaatattgctaggaaaaaatggtgtcttattgggttataacacactagaatattgttttatttttatccttcatcctcagtgaaaaaggatgtacaattagtggcttggcacagactagggctgctttgttaattagatcaccttttatttttctcctaaaggtgaggggggggggggacgaaaacacttcggatggagcggcatacaaatttaaagctatattttccatatatttatttgcatttttcttgtttaatttggtataatcaattttctggtggcaccaaagcacctaagatggacttaggttgggttctttacttcttttagacactttctcaacttctattatctcggtttactttgtacgtttcccaaattgctaaacaatacgttttttataaaaatctataagaaagttgcttataaaaaaccatattaatctatttttaagtttttttaagctaatacttaattaatcgtgcgttactttgttttgtgtgcgagagggaacagttcccaaccctctccaatgaatgtaccctaaaggaggcttgattttttttttcctgaggaagaaaatgacaacgaaacattcacaaattgatcggaagacataattaacagctttattaatatactatttcttttaggggaaacatattttctgtatagtgtgctagttaaccatctatctctaattcatatttcagcatgcttaagacgcttga

SEQ ID NO: 34 - DNA, 4782 bp, Oryza sativa
  misc_feature (1)..(4782): AB003324 5'-regulatory sequence engineered
  misc_feature (1)..(1988): 5'-nontranscribed sequence
  misc_feature (1989)..(2432): 5'UTR
  misc_feature (2248)..(2250): Mutagenized start codon
  misc_feature (2433)..(4763): Intron
  misc_feature (4764)..(4782): Engineered sequence
tctaaatagggcccaacatactcaaggctttggaatattactcacacacacacacacacaaattcatgtgggtcaaatagcttgtcctttagaattttggaatttcccccattctccaactagaatatccaatgaaattattgcgtttaaaagaaagagttgggcggtgacgatatggggttttatcaactttcaaaatgaacacctatgaaatttctacttaacctcaacttcaatatgagaaatgtaaagtaaaaggaaaaattttctacaaaacatctaaaaaacatgatctttgctggtggacaccgttaaaaatgtagcttttgtcttagggcactaaaaaacgtgataatttgctggagaacatcacggcctttaaaatgtaaaatccacttaattgagaagagatgaggcatatgaaatgtttattttgccctcctcttcttcctcgccactcatgtcatcgcctcgctgcctgctaataggggtttgagtgagagagcacaaagattgagaggcggggatatgatcagttcgaactgagacatactccttcgttcacatatgcgggataggggcctcctaaaatatttttctatcaaataggatgaaaacaataaaataatcgatgtttatgttcttcagcaaattaccatatttttatagtgttctcggaaaatccacgttttgatttagatatactgtagcaaatttgccaaattaaaactaaccggtttaattaattttaggttttagcaagtactgtacgctcttcaagttgtggcaactactttgattgcagctacagtacaccccccgatcgagagcgagaccgagggttacgtggtgggcccagcgcggcagccacactgtaggagtgacagtgctaggctacagctactgtgctgggcgtagtagttgttccgctcactgtgcagatgaggtcatgcgctcatcgatccccctcctctcctcctcctcctctctgtcctctgccatcccccccacccgtcacgtgaggcgacgccgccgacctgatggctcgacatgccccccgtcccggtcgacgcgacgtgcactgtgaccggccggaagaacgccccccctgccagccggcgacacgcacgcgtccggccatcgctgcctagctagcgtatcgctcccccagctaccggcctcgccgtgtggcccggcgccccggcgtgcgtacgcgtcgggtacgtaggaaacacggcggcagcgtcgaggcgaggacggggaagcggctggaccggcgggccgggggaagagaggcagccatcctgtactctcctacgtacagccaccttacctgttgcgtcaacgagagcttgggcgttgctcgctacagccgctggctagcttagcttatagctagtctccgcttagcctgtgggcataaaagcacccggcaccagcgtccgctcgacacgtcgcgattccgcctctgtgcgcgctgctgcccgggccgcaccgtgtgatacgtacacaacctcgggttcgacgcccccgccggcccggtcgcttccctcgcctcgctgttaacgtcgctgttacaagcttgcgaattgcgattgtgcgagcgctcgcggcggtattaatttttgctatacctggggcgatggaaacgtaacgtactactactacgtgacctagggtgagagacgagacgagacgagaatatgagatgagatccaaattcaatctgcctctctaccccacgaaagaaaagattcttctcttcgtcgacgacccggcctctcgctctcgttgcctttctttcgcgctcagtctctctcggccaattaagctgtagatcggccaccaccaccaccaccaccaccaccatccacagggcgctgcaagctgggccaggcctctctctatctctctctcttgagaggagagattaagtagggcatagagagaaaaaagctactcctaattaagccacagcttgagcagatcagctgcaggccggccggtgtgcgtgtgtgacagtaggagagagagctagcgagagagagcaaggaatcggaattgatttcatgcactgatcgatccatccatcatgcagatgctgcatggatgagaagagctagcagctaagctttgctgaagaaaattcttcagaggtttgtgttgatttgctggtctgctagagatcgatctagagagagagagaggaagggaagactgaagagagatctcgagcgggagatcgagatcgggcgaggcaaggtggtgcttcagcggatcgagaacaagatcagccggcaggtgacgttcgccaagcggcggaacggcctgctcaagaaggcctacgagctgtccatcctctgcgacgccgaggtcgccctcgtcctcttctcccacgccggccgcctctaccagttctcctcctcatccaagtaaacccactgcccctctcactcatctcagcttcctcctcttcccctaatcaaattctctcaacttgcttaacctgcactccccaaaccgcaatttgctccatctttgcgcgcacaatctgcaagaaatcacgaccgatctgaattttctcgcgcgtgtactgtatccgtcgtcgtccgtgcatgaacttatgggaggggccatgatttcgtacgtgttgttttttctacgcctgttcctttctttctgttctattgggcgaagctactgttcatgtaaaaaaggctacaaaagaacaaggcaaagaagacgaggttgtcctcggcaggagatccagacatgtacatatatgcgtatatataccgtgtgtgtatatatgtatgtgtgtcatagcaggcaagaaaaattaagaaaggggtttcatttgatgtaaatatcatggcgtgtacaaatgctagaatctgaattagcctaaaatttggaggatttaacttgatggagtttaaataatttacttggaagaatgccacttttagtactagctgttgatgagcaaaatttgctgaagaatgccgcttttgatcaaaatttgtcgtttacttatatattatcaaggatacttttgtgtgttaattataaacttgctgcaataaatatctcatgaacacaacacactagttaaactcaccaacatcgtcatgtgttaattcatctacggcttggaacttgcaagaactactttaacgtacaagctctgactttgtatatctgacagtaccaaaatactgttaccttatagctacgttggaaaagatcaactgtacaactactttcagctctataaaacaattcactgtaggcaaatgcaccgtccatatatatagacactctgtgaggtagaattgctaatttatagtatattattatattaacgtgtaattgacccatacaggataatcttcaaatttggggcagtttgcatgaaatgtggaactcacattagcaaaaattgcatattaaagaatacactgaccatgttaatatacatgctagtgagttatagtttgtatggggatgctaatatgttttggcctttttccccatatgaatgtatgctacattcttacaattaatatatacgttacaaagggaaatcaaatgacctagtagtttctattactgaattattgcacatttagtttttccaatcaatcactaaattgccataagggtccagtttttttgtctgtttcttgttggttctttgtcaagtatcatatatatatgtaccatatttttgtaggaatatgcattcgcgctagctaccgtatgatgatcacacaggtttcaacccttggttaacactgttaatttgttgttataaggggtatcatccatagagacagattactgtatttgaataagagatttctgtataataatgctatgccgttattggttctttatcaagtgccacagtaccttgtttttgtagtatatgtgttcactagctaccatgtgatgatcacacaaagtttcaccgttggtgaactgttaatttgtcatatgtgacatgcatcatccatagatacacgtttctcatattaataatttttaaatattgctaggaaaaaatggtgtcttattgggttataacacactagaatattgttttatttttatccttcatcctcagtgaaaaaggatgtacaattagtggcttggcacagactagggctgctttgttaattagatcaccttttatttttctcctaaaggtgaggggggggggggacgaaaacacttcggatggagcggcatacaaatttaaagctatattttccatatatttatttgcatttttcttgtttaatttggtataatcaattttctggtggcaccaaagcacctaagatggacttaggttgggttctttacttcttttagacactttctcaacttctattatctcggtttactttgtacgtttcccaaattgctaaacaatacgttttttataaaaatctataagaaagttgcttataaaaaaccatattaatctatttttaagtttttttaagctaatacttaattaatcgtgcgttactttgttttgtgtgcgagagggaacagttcccaaccctctccaatgaatgtaccctaaaggaggcttgattttttttttcctgaggaagaaaatgacaacgaaacattcacaaattgatcggaagacataattaacagctttattaatatactatttcttttaggggaaacatattttctgtatagtgtgctagttaaccatctatctctaattcatatttcagcatccttaagccaccatgg

SEQ ID NO: 35 - DNA, 1403 bp, Oryza sativa
  misc_feature (1)..(1403): AB003324 3'-regulatory sequence
  misc_feature (1)..(233): 3'-untranslated sequence
  misc_feature (234)..(1403): 3'-nontranscribed sequence
tagctagctagctagctaccgtttcagcttcagttaatcagggtcaagtatcagctgagtttggccatatgtatggattctatatgttgcttcagaagttcctctctccttcctcttcaatttgttgctaattaagtgcttgccaaacttttctcagtgtaatgtactactactatgtatagttttgtcttgtatgaacagtttgtgagtactgtcactgcgagtaaggtgcgtgatatggtaccgtgaaaacaaaagcgggacaaccatcctttttgcgtttacatcatgtttgtgatatcaagtcgatatatccacgatgttgtagtgctcaacagttatagaccttacttttagaaatatcgcactccatttatcatatgtagctaccttaggccaaaaaaaaaaacttttttaaaaaagtgcgtaatattcgtataagagacaacataatttcaccccatcaataaaggtagctgtacataatattctaaatgaagcatgatcggtaggtaaagagatgcgtatagtcatgatgactagacaacactcacgtgcaaggtatgaaactagtggacattgttagtggcacggtcgaggtccatccaccgaccggctaaaatataaaaatgccacacgcactatcaccaccaaaagaaaagaaaatgaataagagaggggccgcgtggagccaggtggggcactagagtactactccctatgtttcaaaatataagcatttttatgatttaaaatttgtatcacaatataattctaaaacactaacatctatatatttttagccaatgagatgcttgggaagttaatacaagcaattcaaaattttaaaaataaccattgtttacaaaaacattttcatttacttaagaataaaaatccttatatttatggacggaagcgaagatgtattagacagagatggtcgtacatttggataggacaacgactttgtctgcccgtggcctcctcccaagcttcatctccaaattaatctactatgttgcgtagcacgaagctatggcctacccctgtcttattcatctcgcacatatcgatacaaaacaaaaagaccgaaacacccatattttatcaaatctcaatgcaattatttctcactttatatactctcagtataattattttgtactttcataaacttcgatgcaatgatcactaaaaataaaattaattttgggataaatataatgagccaaaaataaacttattacgggacggatggagtactatgtggagagggatgtgtggcctaactgctctcttgttgtaatctcacttaggaatatgcttctcctgatattggcttgttgtttttctagctttgggcaggaattattgacgaatttaattgtggtcgatctcca

SEQ ID NO: 36 - DNA, 1400 bp, Oryza sativa
  misc_feature (1)..(1400): AB003324 3'-regulatory sequence engineered
  misc_feature (1)..(230): 3'-untranslated sequence
  misc_feature (231)..(1400): 3'-nontranscribed sequence
ctagctagctagctaccgtttcagcttcagttaatcagggtcaagtatcagctgagtttggccatatgtatggattctatatgttgcttcagaagttcctctctccttcctcttcaatttgttgctaattaagtgcttgccaaacttttctcagtgtaatgtactactactatgtatagttttgtcttgtatgaacagtttgtgagtactgtcactgcgagtaaggtgcgtgatatggtaccgtgaaaacaaaagcgggacaaccatcctttttgcgtttacatcatgtttgtgatatcaagtcgatatatccacgatgttgtagtgctcaacagttatagaccttacttttagaaatatcgcactccatttatcatatgtagctaccttaggccaaaaaaaaaaacttttttaaaaaagtgcgtaatattcgtataagagacaacataatttcaccccatcaataaaggtagctgtacataatattctaaatgaagcatgatcggtaggtaaagagatgcgtatagtcatgatgactagacaacactcacgtgcaaggtatgaaactagtggacattgttagtggcacggtcgaggtccatccaccgaccggctaaaatataaaaatgccacacgcactatcaccaccaaaagaaaagaaaatgaataagagaggggccgcgtggagccaggtggggcactagagtactactccctatgtttcaaaatataagcatttttatgatttaaaatttgtatcacaatataattctaaaacactaacatctatatatttttagccaatgagatgcttgggaagttaatacaagcaattcaaaattttaaaaataaccattgtttacaaaaacattttcatttacttaagaataaaaatccttatatttatggacggaagcgaagatgtattagacagagatggtcgtacatttggataggacaacgactttgtctgcccgtggcctcctcccaagcttcatctccaaattaatctactatgttgcgtagcacgaagctatggcctacccctgtcttattcatctcgcacatatcgatacaaaacaaaaagaccgaaacacccatattttatcaaatctcaatgcaattatttctcactttatatactctcagtataattattttgtactttcataaacttcgatgcaatgatcactaaaaataaaattaattttgggataaatataatgagccaaaaataaacttattacgggacggatggagtactatgtggagagggatgtgtggcctaactgctctcttgttgtaatctcacttaggaatatgcttctcctgatattggcttgttgtttttctagctttgggcaggaattattgacgaatttaattgtggtcgatctcca

SEQ ID NO: 37 - DNA, 1702 bp, Oryza sativa
  misc_feature (1)..(1702): AB003328 5'-regulatory sequence
  misc_feature (1)..(1400): 5'-nontranscribed sequence
  misc_feature (1401)..(1519): 5'-UTR
  misc_feature (1520)..(1655): Intron
  misc_feature (1656)..(1702): Exon
aacaaaaccaataatctccaatgcccaattgttcatcacaaaataataataaaaaacacctttgattttacaaaatatttaaatgcaaaaacgactttcacgtaggttccatgtgtcagtttaggggacttggtggtgggagtggcagactcaccatatccaccactcttttttttcttttaaagtagtatagatcttctctgaaagtccactaggagtcgatgttaagcttaatataacatcggcttttatctcatctcttgatccaaaaggaaataggagcacatgtgatttgaaatgtcacagtaaatcccagtgaaaaaagcctaaggaagtgagctatgctcatgctgcttttactactactccatccgtcccataatataagggattttgagtttttgcttgcaacgtttgaccactcgtcttattcaaaaatttttgaaattattatttattttatttgtgacttactttattatctacagtactttaagcacaacttttcgttttttatatttgcaaaaaaaatttaaataagacgagtggtcaaacgttgcaagcaaaaacttaaaatcccttatattgtgggacggagggagtagtacttactagtgctaggctgctagctagtactaggatttttgatgtgaaatagtagtggagattctctcggaacagtaattttggaacaatcacgagtaaagcacctgttaggatggaacttttcgtaatactaatacgttgtgaatcgagtgagcatgatctttttataatcctcgtcgagcgcgagatctgattgtccggtacagtattttattcaaccgaacatgacaaagtgttttaacgtcgaaaagtcactagtttacctcggggtgaggtgagcagccaatcgggtggggtgtcaaagacagaaaccaaaaggcagccagtcatcagagcggtcactgcggcacacgtcgtggggcgtggttggaggttcgctcaagtcgtggtcgtcctcgtcccggttggatggactagggggtgcaatgcaaatagcgtatggttacgggcgggtaattgcaaaaaatgcggcgcacccgtgttgtggcaccaataatgttgggcttctctccccgagaagagacagccaatgggggggggggggggggcggaagcggaaccaactttttcgccggatgggaaatttcggcctcgctttccttgtttgttcggcccggatgcattaccacttctgcccctgggtgcggtggccatgatgacgataaaaaacggaaacgcaaccgcacgcactcctcctgttgccgtttgcctctgtctccccctaccgcgcggtggggtggccactacgcgaacaaagggaaacggcaacacccgcagggaccaaaaaggaaagccgaggaggagagggaggggagagaagggagagggggtcggggagaaagaagagcgagcgagcagctttggctacggccaaaccctacagcgcctccaccaccactccttgccttttttggtgagtcgccctttgccgactctcagatccccttgcgttttaccacttttgccttgtccgccgcccctccaattgggataaaaaagaaaagagctgcatctctcgctgctcctcctcctcctcctccgccgtgcaggccgcagccgctcgtgtggttggttggttcatcggcgatcgaagatg

SEQ ID NO: 38 - DNA, 1915 bp, Oryza sativa
  misc_feature (1)..(1915): AB003328 3'-regulatory sequence
  misc_feature (1)..(703): 3'-untranslated sequence
  misc_feature (704)..(1915): 3'-nontranscribed sequence
taagtaacaggccaggaataagctggatctctgcgttgagaaaggagatgatgctaggcatgcaatgacaccaaaccatcctaaaaacagaccacgctgtatattttacttacccgtattgtcgtccatggatgcgaaatgctagacgcatatgcacccacccattcagcaccaccaggcagaaacccttcgatcggcagactccactacccatctaaatctaaatcgagagatctcaagtgcatacttgtactcctgcttgattgtggcttggtatttgatgtgatgttggagcaaacatatgctgaacatatctcagttgagattctctgcacaaggccggaacgggaggaagacgaaaggaggagttttaaagagggagggagtacattcaggtgacagatcgctttgacctgtacccctgttgtatatgacgcgctatgctggtattggtcgacgtttcgatctcttgaatgctacctgtggtcgacgtgtcgattgggcagtggaagccgaggagacttatggacccttatccccatcgcttctagtagtatccctcgattcggtgcgtgataacggtttttgcttgcaaagccgcgatgtgatttttccaactctggagtctgaagtagtagtagtatatttctctttacagcgagtatatatggaatttttttgagaattaatattatttttatggaaaatcgcaaaagtagtggccaaccggggaaaatcgcgaaagtaggtccctgtcgaacgggtgcaattcgataggacacctatcgaacaacgggcagtcgacaaacacctgtcgaacggctggcgttcgacacactcacctgtcgaacggagggagttcgaaagggcccaccaccggcgccgcgaggcctgtcgaaccgggggcgttcgacagcgctcacctgtcgaacggagggagttcgacagggcccaccacccggcgccgcgaggcctgtcgaaccgggggcgttcgacagggccctccaccgaccctgtcgaacaatcggcgtttgacaggccggtttaaaagccccgtccgcgagttcgatttgtttcgaggaccacatcgccagccgccgccgagagtcgccagttcgtcgccgtgagcgccggagggagcgaggggaggggatagcaggccggagaggaggccgaggaggcgccggccgggaggaaagggttggcgacgccctccagcagtgaagttaaggtatacattagtaatccctaagtacaatgcatatgaaagtttaataaaaaattggtttaagagttgttaattgtttcgcattgttcgatgttagtatgtatggttagcacatatttgttattgctaaatgttggtagaggtatttaagtaattgtacggttaaattagttcttagttagtacatattattgatatgttgtgtgttaaaatatgtacaaaggtgttatattttatttggattattaaactagttgtttgttactaatagttgtaaattagtacacggcaatgtagtataagttgtaatagggtaattatcgaatgattaaatgattaaacgtgagactatttgtcatgttttatcaggatgtcaggtgatatgcccattcgtctgtattatggcgatgctcctatacaaatatgtgatagcggggtggatttgactgtatatgccttccatgatactagtctgaatgcaccggagcatatgggtttgaacgacgtgttagggtggttgtataatatgtttggggtagatccagtacacgataaatttgtcataaatgccgtgtggccagtgaggggtcaacatggatggcagtggagagtagtggaggttgcgtcaactgggagttggaggaagtttgttagtaaagtaagggagaaaggctatagcccggcaat

SEQ ID NO: 39 - DNA, 1703 bp, Oryza sativa
  misc_feature (1)..(1703): AB003328 5'-regulatory sequence engineered
  misc_feature (1)..(1399): 5'-nontranscribed sequence
  misc_feature (1400)..(1519): 5'-UTR
  misc_feature (1520)..(1655): Intron
  misc_feature (1656)..(1703): partial exon engineered
aacaaaaccaataatctccaatgcccaattgttcatcacaaaataataataaaaaacacctttgattttacaaaatatttaaatgcaaaaacgactttcacgtaggttccatgtgtcagtttaggggacttggtggtgggagtggcagactcaccatatccaccactcttttttttcttttaaagtagtatagatcttctctgaaagtccactaggagtcgatgttaagcttaatataacatcggcttttatctcatctcttgatccaaaaggaaataggagcacatgtgatttgaaatgtcacagtaaatcccagtgaaaaaagcctaaggaagtgagctatgctcatgctgcttttactactactccatccgtcccataatataagggattttgagtttttgcttgcaacgtttgaccactcgtcttattcaaaaatttttgaaattattatttattttatttgtgacttactttattatctacagtactttaagcacaacttttcgttttttatatttgcaaaaaaaatttaaataagacgagtggtcaaacgttgcaagcaaaaacttaaaatcccttatattgtgggacggagggagtagtacttactagtgctaggctgctagctagtactaggatttttgatgtgaaatagtagtggagattctctcggaacagtaattttggaacaatcacgagtaaagcacctgttaggatggaacttttcgtaatactaatacgttgtgaatcgagtgagcatgatctttttataatcctcgtcgagcgcgagatctgattgtccggtacagtattttattcaaccgaacatgacaaagtgttttaacgtcgaaaagtcactagtttacctcggggtgaggtgagcagccaatcgggtggggtgtcaaagacagaaaccaaaaggcagccagtcatcagagcggtcactgcggcacacgtcgtggggcgtggttggaggttcgctcaagtcgtggtcgtcctcgtcccggttggatggactagggggtgcaatgcaaatagcgtatggttacgggcgggtaattgcaaaaaatgcggcgcacccgtgttgtggcaccaataatgttgggcttctctccccgagaagagacagccaatgggggggggggggggggcggaagcggaaccaactttttcgccggatgggaaatttcggcctcgctttccttgtttgttcggcccggatgcattaccacttctgcccctgggtgcggtggccatgatgacgataaaaaacggaaacgcaaccgcacgcactcctcctgttgccgtttgcctctgtctccccctaccgcgcggtggggtggccactacgcgaacaaagggaaacggcaacacccgcagggaccaaaaaggaaagccgaggaggagagggaggggagagaagggagagggggtcggggagaaagaagagcgagcgagcagctttggctacggccaaaccctacagcgcctccaccaccactccttgccttttttggtgagtcgccctttgccgactctcagatccccttgcgttttaccacttttgccttgtccgccgcccctccaattgggataaaaaagaaaagagctgcatctctcgctgctcctcctcctcctcctccgccgtgcaggccgcagccgctcgtgtggttggttggttcatcggcgatccaccatgg

SEQ ID NO: 40 - DNA, 1912 bp, Oryza sativa
  misc_feature (1)..(1912): AB003328 3'-regulatory sequence engineered
  misc_feature (1)..(700): 3'-untranslated sequence
  misc_feature (701)..(1912): 3'-nontranscribed sequence
gtaacaggccaggaataagctggatctctgcgttgagaaaggagatgatgctaggcatgcaatgacaccaaaccatcctaaaaacagaccacgctgtatattttacttacccgtattgtcgtccatgcatgcgaaatgctagacgcatatgcacccacccattcagcaccaccaggcagaaacccttcgatcggcagactccactacccatctaaatctaaatcgagagatctcaagtgcatacttgtactcctgcttgattgtggcttggtatttgatgtgatgttggagcaaacatatgctgaacatatctcagttgagattctctgcacaaggccggaacgggaggaagacgaaaggaggagttttaaagagggagggagtacattcaggtgacagatcgctttgacctgtacccctgttgtatatgacgcgctatgctggtattggtcgacgtttcgatctcttgaatgctacctgtggtcgacgtgtcgattgggcagtggaagccgaggagacttatggacccttatccccatcgcttctagtagtatccctcgattcggtgcgtgataacggtttttgcttgcaaagccgcgatgtgatttttccaactctggagtctgaagtagtagtagtatatttctctttacagcgagtatatatggaatttttttgagaattaatattatttttatggaaaatcgcaaaagtagtggccaaccggggaaaatcgcgaaagtaggtccctgtcgaacgggtgcaattcgataggacacctatcgaacaacgggcagtcgacaaacacctgtcgaacggctggcgttcgacacactcacctgtcgaacggagggagttcgaaagggcccaccaccggcgccgcgaggcctgtcgaaccgggggcgttcgacagcgctcacctgtcgaacggagggagttcgacagggcccaccacccggcgccgcgaggcctgtcgaaccgggggcgttcgacagggccctccaccgaccctgtcgaacaatcggcgtttgacaggccggtttaaaagccccgtccgcgagttcgatttgtttcgaggaccacatcgccagccgccgccgagagtcgccagttcgtcgccgtgagcgccggagggagcgaggggaggggatagcaggccggagaggaggccgaggaggcgccggccgggaggaaagggttggcgacgccctccagcagtgaagttaaggtatacattagtaatccctaagtacaatgcatatgaaagtttaataaaaaattggtttaagagttgttaattgtttcgcattgttcgatgttagtatgtatggttagcacatatttgttattgctaaatgttggtagaggtatttaagtaattgtacggttaaattagttcttagttagtacatattattgatatgttgtgtgttaaaatatgtacaaaggtgttatattttatttggattattaaactagttgtttgttactaatagttgtaaattagtacacggcaatgtagtataagttgtaatagggtaattatcgaatgattaaatgattaaacgtgagactatttgtcatgttttatcaggatgtcaggtgatatgcccattcgtctgtattatggcgatgctcctatacaaatatgtgatagcggggtggatttgactgtatatgccttccatgatactagtctgaatgcaccggagcatatgggtttgaacgacgtgttagggtggttgtataatatgtttggggtagatccagtacacgataaatttgtcataaatgccgtgtggccagtgaggggtcaacatggatggcagtggagagtagtggaggttgcgtcaactgggagttggaggaagtttgttagtaaagtaagggagaaaggctatagcccggcaat

SEQ ID NO: 41 - DNA, 1982 bp, Oryza sativa
  misc_feature (1)..(1982): AB077760 5'-regulatory sequence
  misc_feature (1)..(1583): 5'-nontranscribed sequence
  misc_feature (460)..(460): m is a or c
  misc_feature (1584)..(1864): exon
  misc_feature (1865)..(1965): intron
  misc_feature (1966)..(1982): exon
attcgttgggggtgacatgactagtcacgagctgcctatatgtaacactagaagaggcttctagtggtcgtagtagcttggtttggttgctggacaatgagagttggtagcaagaggtgcaccctgctgtccccccggttcagggataaaatgaagcacaggctggaacttagattgtctagagatggtaattggtcaattggtgaagttgtgacttgtgattacgagcatcttgctcttgcaggacattgctctccccttcgctcgtaattggtagtttgttgtcattggccttgtttggatcctccgggctattaaatagctatccggaatcttgctatttaggattattaaacgtagattaccgacaaaaccgatcccataacccctagactattttgcgagacgaatctaatgatgtatattaatccataattagcggctgattactgtagcatcmctgtagcaaatcatggattaatatacctcgttagattcgtttcgcaaaatagcctaggggttatggaatgagttttgtcagtattctaagtttaatactcttaaatagcaagatttcggagggctatttaatagccctccggatccaaacagggccattgtcttttaaaaacacctaggggtcttctggccagctccacgagatggtgggttagacggcctgggttcaaaacctcaccccttctaattatttgatattatgtcattttctaatattcgcgtctgttttgttgtcatcgtctttctaagcgtgcgtgcttgcaaaggaaaggagtagagagagagagaggcacatcagcagatcgagagagagaagctggtatgacaaaagaaaagaaaagacagaagatgactcatgcacacttgcgaaatcaaaccaaaagagaatcaaagcgaggcaatatgtacgcgcagaagcaatgatgaagcgaaagccgaaatggtgctaaccgttgggcggccagccacgcatgcagcgaatcggtcgatcgatcatgcagctgctaacacacacacaagagaagacgagacgaaactcagccggccggtgattcgatcgagagtaggtgacacagccaagcaggatagaggctatttttaggagagcttctagctgctgcaacttctctcagaattagaagctcccccaaacagtatatcttttggttcatattctaagaagttgtagttgtagaatccagaaagtgaaccagaagctagaagctgaaaaacctagcttttcaatattctcagaagctgtagttgtaaaatctagaaaatgaatcagaaaccaaaaaaatgaaaaatccagcttttctagattcttataaattgtctacaaatcagctgcttctcataattttaaactccacaaatactgcaggatccgtctccgcgaaccgagagacgttacggtatacggagtgggcacgattgctttcacgagttgggaatccgttgctgtcgtacgtctcgtctatggcgtgctgtatgtcctctccttctttcttcctttccaaataagcactcctcttcttcctcctcctcctcctccgcctcctcttctcattcccaactcatcgatccatcagtagctagctagctagctagctagctgcattgtccggcgagagagatagctgctgcagggggcggccatggggaggggcaagatcgagatcaagcggatcgagaacgcgaccaacaggcaggtgacctactcgaagcgccgcacggggatcatgaagaaggccagggagctcaccgtgctctgcgacgcccaggtcgccatcatcatgttctcctccaccggcaagtaccacgagttctgcagcccttccaccgagtctgtatctccatctccacttcgactctatgatcttctccatcctgattatactatatatataactgcatcatatcgatcttaattgcatcctgctgcagcatcaaggggatctttg

SEQ ID NO: 42 - DNA, 986 bp, Oryza sativa
  misc_feature (1)..(986): AB077760 3'-regulatory sequence
  misc_feature (1)..(457): 3'-untranslated sequence
  misc_feature (458)..(986): 3'-nontranscribed sequence
tgatatatcatcgccgccgccgccgccgccgccggcggcctgctcgtcgccggccggccggccgccggacaccgtatcatcgctcgatctagataacaagccgacgaataaattgcagtgctcgtgttacttacctgcatgcgcatgcattattatcgatcaacgcaagaacttcatttcatttaccaaaccacttgatgtgtgctatgatccagcggttaaaccgtgtgttgtctcttgacattttgtaccagttactgatgatgttgtattatgtatgcgtggtgtgcaactgtgcttggataatttcacacttatttgccacgcttgctttattagctttgactatcaagctactgatcagagagttacctagctcaaaggattaattattatgtatacagctcaaatacattaatgggctactggctgctgctgtccgagtaattatttacacctgtggtatatcgcttagtccgttttgttgggattttgttgttggtcttgtgtcatcttggtgtgttttgttgtttttttctctttatttgtgtgttttttctttggctctttggggaggtttttacctcctatgttctcttcttaatgaaatggcgcacaattcttttgcgattttgaggaaaaaaaaaagattacctccgtggccaatcagcaagctcgccctcgccggcgccggtgagggcgaggagatcgccgttgttggctgttgtttgggctggacagcccaacaattactgctcagtagcccactctgggtgaaagcccgctcatcccgatagagttaacttccgtgggccgatttgtcgcgcaaccaaggtggcccgctccgcctccttcgttgcacgtgggcccataccacggtgaaaccatgtgtgggccttatttgggcttaactctggcccattaataatcgctggacagcgtccatgctagctactgcatttcttttttcgatttcagtaccacgg

SEQ ID NO: 43 - DNA, 1983 bp, Oryza sativa
  misc_feature (1)..(1983): AB077760 5'-regulatory sequence engineered
  misc_feature (1)..(1583): 5'-nontranscribed sequence
  misc_feature (460)..(460): m is a or c
  misc_feature (1584)..(1864): Exon
  misc_feature (1865)..(1965): Intron
  misc_feature (1966)..(1983): Exon
attcgttgggggtgacatgactagtcacgagctgcctatatgtaacactagaagaggcttctagtggtcgtagtagcttggtttggttgctggacaatgagagttggtagcaagaggtgcaccctgctgtccccccggttcagggataaaatgaagcacaggctggaacttagattgtctagagatggtaattggtcaattggtgaagttgtgacttgtgattacgagcatcttgctcttgcaggacattgctctccccttcgctcgtaattggtagtttgttgtcattggccttgtttggatcctccgggctattaaatagctatccggaatcttgctatttaggattattaaacgtagattaccgacaaaaccgatcccataacccctagactattttgcgagacgaatctaatgatgtatattaatccataattagcggctgattactgtagcatcmctgtagcaaatcatggattaatatacctcgttagattcgtttcgcaaaatagcctaggggttatggaatgagttttgtcagtattctaagtttaatactcttaaatagcaagatttcggagggctatttaatagccctccggatccaaacagggccattgtcttttaaaaacacctaggggtcttctggccagctccacgagatggtgggttagacggcctgggttcaaaacctcaccccttctaattatttgatattatgtcattttctaatattcgcgtctgttttgttgtcatcgtctttctaagcgtgcgtgcttgcaaaggaaaggagtagagagagagagaggcacatcagcagatcgagagagagaagctggtatgacaaaagaaaagaaaagacagaagatgactcatgcacacttgcgaaatcaaaccaaaagagaatcaaagcgaggcaatatgtacgcgcagaagcaatgatgaagcgaaagccgaaatggtgctaaccgttgggcggccagccacgcatgcagcgaatcggtcgatcgatcatgcagctgctaacacacacacaagagaagacgagacgaaactcagccggccggtgattcgatcgagagtaggtgacacagccaagcaggatagaggctatttttaggagagcttctagctgctgcaacttctctcagaattagaagctcccccaaacagtatatcttttggttcatattctaagaagttgtagttgtagaatccagaaagtgaaccagaagctagaagctgaaaaacctagcttttcaatattctcagaagctgtagttgtaaaatctagaaaatgaatcagaaaccaaaaaaatgaaaaatccagcttttctagattcttataaattgtctacaaatcagctgcttctcataattttaaactccacaaatactgcaggatccgtctccgcgaaccgagagacgttacggtatacggagtgggcacgattgctttcacgagttgggaatccgttgctgtcgtacgtctcgtctatggcgtgctgtatgtcctctccttctttcttcctttccaaataagcactcctcttcttcctcctcctcctcctccgcctcctcttctcattcccaactcatcgatccatcagtagctagctagctagctagctagctgcattgtccggcgagagagatagctgctgcagggggcggccatcgggaggggcaagatcgagatcaagcggatcgagaacgcgaccaacaggcaggtgacctactcgaagcgccgcacggggatcatcaagaaggccagggtgctcaccgtgctctgcgacgcccaggtcgccatcatcatcttctcctccaccggcaagtaccacgagttctgcagcccttccaccgagtctgtatctccatctccacttcgactctatgatcttctccatcctgattatactatatatataactgcatcatatcgatcttaattgcatcctgctgcagcatcaagggccaccatgg

SEQ ID NO: 44 - DNA, 983 bp, Oryza sativa
  misc_feature (1)..(983): AB077760 3'-regulatory sequence engineered
  misc_feature (1)..(454): 3'-untranslated sequence
  misc_feature (455)..(983): 3'-nontranscribed sequence
tatatcatcgccgccgccgccgccgccgccggcggcctgctcgtcgccggccggccggccgccggacaccgtatcatcgctcgatctagataacaagccgacgaataaattgcagtgctcgtgttacttacctgcatgcgcatgcattattatcgatcaacgcaagaacttcatttcatttaccaaaccacttgatgtgtgctatgatccagcggttaaaccgtgtgttgtctcttgacattttgtaccagttactgatgatgttgtattatgtatgcgtggtgtgcaactgtgcttggataatttcacacttatttgccacgcttgctttattagctttgactatcaagctactgatcagagagttacctagctcaaaggattaattattatgtatacagctcaaatacattaatgggctactggctgctgctgtccgagtaattatttacacctgtggtatatcgcttagtccgttttgttgggattttgttgttggtcttgtgtcatcttggtgtgttttgttgtttttttctctttatttgtgtgttttttctttggctctttggggaggtttttacctcctatgttctcttcttaatgaaatggcgcacaattcttttgcgattttgaggaaaaaaaaaagattacctccgtggccaatcagcaagctcgccctcgccggcgccggtgagggcgaggagatcgccgttgttggctgttgtttgggctggacagcccaacaattactgctcagtagcccactctgggtgaaagcccgctcatcccgatagagttaacttccgtgggccgatttgtcgcgcaaccaaggtggcccgctccgcctccttcgttgcacgtgggcccataccacggtgaaaccatgtgtgggccttatttgggcttaactctggcccattaataatcgctggacagcgtccatgctagctactgcatttcttttttcgatttcagtaccacgg

SEQ ID NO: 45 - DNA, 2819 bp, Oryza sativa
  misc_feature (1)..(2819): AB095645 5'-regulatory sequence
  misc_feature (1)..(2130): 5'-nontranscribed sequence
  misc_feature (2131)..(2446): Exon
  misc_feature (2447)..(2803): Intron
  misc_feature (2804)..(2819): Exon
ctcgtcgccgtcgttggctcggcgtctcgccgccgtttacctttcccgtttccgagcccggagagggtatcgcttgccttgatggacgcgcgcgtgggccgggggaaatgtggtttggttgactcgcgcctgtcttgggccgtgattgattcagcccagtctgccagtttgctgtcttgaattctcggaggcccatgtagagaaatccatctatccacgtggaaacgtgggccatggccattgagcgaaatcagattagaaaaagtataatttgactccctcaactatcgcccgagtatgattcatatcctcccactacaaaacagatacatcgacccctacaattatcaaaaccaatgcaaacaatgtccctcggtggttttggctgaagtgtcgcctacgtggcggttttggctgagtctttgtcctacgtggcgcgtggcattagaataaaaaaatatgggacccatatgtcattcataaaaaaatatattatgggacccacatgtcatccttcctctccttcccttcttcctcccgtctttctctctcccttatctctctcccagcctttctgatcgaagcggcggtggcggcggtcgggagcagctgcggtggtggtggggagcggcgacgatggcggtcgggagcggcggctgtggcgatggggacgaggtggttgggagcagcggcggtagcagtggggacaaggcggtgggaaggggcggacgtgggccagtgctcgggcttgacggcggtgcagagtagggcgacctcggtgagcctcagcatgtcgccgtggcggtcccggtcggtgacgatctccacatcgaggatgtctgtcgaccactcatggctcagcgccagttgcgcccactccgccaggtcgtcgtcctcgtcgacggggaccttcccggtgaccacctcgagcagcacgagcccgaggcagaacacgtcggcatgggaggacagccgcctcccgcacgtgaactctgagcacttggccgccgcgagacgatgaccgtggtgcagaagcagcgggtagaacccgtggtcggtcaacttggccaccggcaccacgtcgccgccgctgccgggcgccgggaagacgacgagcacgttcgacgacttgaggttgccgtgcggcggccggtggacgaggtcgcctggctctggacacgcgcgtgcaccaccaccggacgccgccgtcgctccctaccgtcgtccccaccgccaccgccgccgctccagagagagagataagggagagagagggggaggaagaagggaaagagagggaagatgacatgtgggtcccacaatactttttattgtgtgaatgacatatgggtcctacatatttttttttgtttttattctaatgcaacgtaagcgctacgtaggactaagactgggtcaatactgccgcgtaggcgccacgtcagccaaaaccgcttccaaaaccacacaggaatatattttgcaccgattttaatagttagaggagtcaatatacctggttttgtggttggaggttatgaatcatactcgaggcatagttgagggaggccgtgtttagttgcaaattttctcttcaaacttcaaacttttccatcacatcaaaactttcgtacacacacaaacttccaactttttcgtcacattgttccaatttcaaccaaacttccaattttgaactaaacagcagccggagtcaaagtactttttccaatcagatttgagccgatcatgatttgaactcttcaaaactactagtaattttcagttcgaattcatgaaagttcacatcatgctatacctacacctagcatgtataggactggactgtattggtactagtactacagagtatcatagccgtacgggtatcatagacaagacaatacagaaagtacagtgtcctggaaacgtcaatgatcaaatcgaccatcaatccctcctcacctttcggctttccatcaaccggaatcaaatcggatagcgaagcaaagccaacggaagcaaagtaaacagggcattgccgtttctggagctcccctactgaaccgcctcgaaagcctcctcatcaccattcctcttcctcccatggcgaactcctttactcctcctccacccccaccgcctcgcccatccacaccgacgccaaggcagcgcttgttcttgttgttgttgttgttgttggcttcgctttgctgctaagctagctggaggaaggaggaggaggaggaggaggcgggatggggcgcgggaagatcgagatcaagaggatcgagaactccaccaaccgccaggtgaccttctccaagcgcaggagcgggatcctcaagaaggcccgcgagatcagcgtcctgtgcgacgccgaggtcggcgtcgtcatcttctccagcgccggcaagctctacgactactgctcccccaagacctcgtgcgtccccccctcttctcctccccctggttcttttgcacataatatttttcagtgtactctttgtctagatgataaggtatatatgcaagaatcgttttgatgcaacaactaggttgaagatttttactctactccccaaaaaaagggaaaagggagatttttactctaccaacttgccaggaccggaactgtgtttttgtattggttaaagtcagtttcttttgcaggaaatgccatgtccttactctttttcctaaaatcggttttgagttatgctgatatagtatcttgaaccactcgcatctgttgcactgacatgcttgattaaccttccaatggtgggacatgtataaggctatcaagaatcttg

SEQ ID NO: 46 - DNA, 1170 bp, Oryza sativa
  misc_feature (1)..(1170): AB095645 3'-regulatory sequence
  misc_feature (1)..(376): 3'-untranslated sequence
  misc_feature (377)..(1170): 3'-nontranscribed sequence
taagctgctaggttgccccgccacttcgatcagttatctcatccactgatccaccactggattgaatgtcctagtgcattgtcaactgtatccctgttttcatgtctgtttcgatgaactattgagcatgtcatatgtgagttgctttgtgtgccaatatatagtctgtctctagtacaagctctgtgcttgccattctgcctcgctgtagatagcaccagcaatggagctagctcagatatcagtaacttcgtgcaagctgcaaggtatgcttgtgttatcaccgcatttgtcagatggtgaatagtagtttgtgattgtaacaaacaatttatgcaagcttggtttcatgctaatgtcgtttcacttgcatttcaacacatgatatactgtcagttactgagttacatgactctgaggctctgagcatcagttagctaccacttacaaattaaagtacagtatatattatgcataatatcattagcattccaacacaaagacagtgatacactgtcatttacatcaactattggtgttgactaactctgaacatcagttggtctgcattcgttgcaattttacatgctgcaataaactgcagcattgcagcctgtaaaattgcagatccatggatgtctccaaactcaaaacatatttctcgttgcatccatcaacgattgataccattgccctcaccggagcatgtcgccgaagtccatgaacggggggccgctcagcacggacgaggcgctgaaattggcttcgccttcgtcgaacgcgatcctctggccgtacggctgcggccgttccggcaggtcgggcacgtccatgtcgccctccagcatcctcagcgcctccggcatggtggggcggcacgccacggtgacgtgcgcgcacaggatcccgacgagcacgaacctctccatggcgtgcaccccggcggggccctcccgctcgcgcagcgccgcggcgaccacctccgccgcgcgcccggccctgacgagcgcccacgcccagtcggtgatcagcacgacgccggaggggtcggacaggtcgagcgcgcgccggccgctcatcacctccagcaccagcacgccgaagctgtacacgtcgctcttctcggtgagctgcccgtacagcgcgtactccggcgagaggtagccgtgc

SEQ ID NO: 47 - DNA, 2820 bp, Oryza sativa
  misc_feature (1)..(2820): AB095645 5'-regulatory sequence engineered
  misc_feature (1)..(2130): 5'-nontranscribed sequence
  misc_feature (2131)..(2446): Exon
  misc_feature (2447)..(2803): Intron
  misc_feature (2803)..(2820): Exon
ctcgtcgccgtcgttggctcggcgtctcgccgccgtttacctttcccgtttccgagcccggagagggtatcgcttgccttgatggacgcgcgcgtgggccgggggaaatgtggtttggttgactcgcgcctgtcttgggccgtgattgattcagcccagtctgccagtttgctgtcttgaattctcggaggcccatgtagagaaatccatctatccacgtggaaacgtgggccatcgccattgagcgaaatcagattagaaaaagtataatttgactccctcaactatcgcccgagtatgattcatatcctcccactacaaaacagatacatcgacccctacaattatcaaaaccaatgcaaacaatgtccctcggtggttttggctgaagtgtcgcctacgtggcggttttggctgagtctttgtcctacgtggcgcgtggcattagaataaaaaaatatgggacccatatgtcattcataaaaaaatatattatgggacccacatgtcatccttcctctccttcccttcttcctcccgtctttctctctcccttatctctctcccagcctttctgatcgaagcggcggtggcggcggtcgggagcagctgcggtggtggtggggagcggcgacgatggcggtcgggagcggcggctgtggcgatggggacgaggtggttgggagcagcggcggtagcagtggggacaaggcggtgggaaggggcggacgtgggccagtgctcgggcttgacggcggtgcagagtagggcgacctcggtgagcctcagcatgtcgccgtggcggtcccggtcggtgacgatctccacatcgaggatgtctgtcgaccactcatggctcagcgccagttgcgcccactccgccaggtcgtcgtcctcgtcgacggggaccttcccggtgaccacctcgagcagcacgagcccgaggcagaacacgtcggcatgggaggacagccgcctcccgcacgtgaactctgagcacttggccgccgcgagacgatgaccgtggtgcagaagcagcgggtagaacccgtggtcggtcaacttggccaccggcaccacgtcgccgccgctgccgggcgccgggaagacgacgagcacgttcgacgacttgaggttgccgtgcggcggccggtggacgaggtcgcctggctctggacacgcgcgtgcaccaccaccggacgccgccgtcgctccctaccgtcgtccccaccgccaccgccgccgctccagagagagagataagggagagagagggggaggaagaagggaaagagagggaagatgacatgtgggtcccacaatactttttattgtgtgaatgacatatgggtcctacatatttttttttgtttttattctaatgcaacgtaagcgctacgtaggactaagactgggtcaatactgccgcgtaggcgccacgtcagccaaaaccgcttccaaaaccacacaggaatatattttgcaccgattttaatagttagaggagtcaatatacctggttttgtggttggaggttatgaatcatactcgaggcatagttgagggaggccgtgtttagttgcaaattttctcttcaaacttcaaacttttccatcacatcaaaactttcgtacacacacaaacttccaactttttcgtcacattgttccaatttcaaccaaacttccaattttgaactaaacagcagccggagtcaaagtactttttccaatcagatttgagccgatcatgatttgaactcttcaaaactactagtaattttcagttcgaattcatgaaagttcacatcatgctatacctacacctagcatgtataggactggactgtattggtactagtactacagagtatcatagccgtacgggtatcatagacaagacaatacagaaagtacagtgtcctggaaacgtcaatgatcaaatcgaccatcaatccctcctcacctttcggctttccatcaaccggaatcaaatcggatagcgaagcaaagccaacggaagcaaagtaaacagggcattgccgtttctggagctgccctactgaaccgcctcgaaagcctcctcatcaccattcctcttcctcccatcgcgaactcctttactcctcctccacccccaccgcctcgcccatccacaccgacgccaaggcagcgcttgttcttgttgttgttgttgttgttggcttcgctttgctgctaagctagctggaggaaggaggaggaggaggaggaggcgggatcgggcgcgggaagatcgagatcaagaggatcgagaactccaccaaccgccaggtgaccttctccaagcgcaggagcgggatcctcaagaaggcccgcgagatcagcgtcctgtgcgacgccgaggtcggcgtcgtcatcttctccagcgccggcaagctctacgactactgctcccccaagacctcgtgcgtccccccctcttctcctccccctggttcttttgcacataatatttttcagtgtactctttgtctagatgataaggtatatatgcaagaatcgttttgatgcaacaactaggttgaagatttttactctactccccaaaaaaagggaaaagggagatttttactctaccaacttgccaggaccggaactgtgtttttgtattggttaaagtcagtttcttttgcaggaaatgccatgtccttactctttttcctaaaatcggttttgagttatgctgatatagtatcttgaaccactcgcatctgttgcactgacatgcttgattaaccttccaatggtgggacatgtataaggctatcaaccaccatgg

SEQ ID NO: 48 - DNA, 1168 bp, Oryza sativa
  misc_feature (1)..(1168): AB095645 3'-regulatory sequence engineered
  misc_feature (1)..(372): 3'-untranslated sequence
  misc_feature (373)..(1168): 3'-nontranscribed sequence
gctgctaggttgccccgccacttcgatcagttatctcatccactgatccaccactggattgaatgtcctagtgcattgtcaactgtatccctgttttcatgtctgtttcgatgaactattgagcatgtcatatgtgagttgctttgtgtgccaatatatagtctgtctctagtacaagctctgtgcttgccattctgcctcgctgtagatagcaccagcaatggagctagctcagatatcagtaacttcgtgcaagctgcaaggtatgcttgtgttatcaccgcatttgtcagatggtgaatagtagtttgtgattgtaacaaacaatttatgcaagcttggtttcatgctaatgtcgtttcacttgcatttcaacacatgatatactgtcagttactgagttacatgactctgaggctctgagcatcagttagctaccacttacaaattaaagtacagtatatattatgcataatatcattagcattccaacacaaagacagtgatacactgtcatttacatcaactattggtgttgactaactctgaacatcagttggtctgcattcgttgcaattttacatgctgcaataaactgcagcattgcagcctgtaaaattgcagatcgatggatgtctccaaactcaaaacatatttctcgttgcatccatcaacgattgataccattgccctcaccggagcatgtcgccgaagtccatgaacggggggccgctcagcacggacgaggcgctgaaattggcttcgccttcgtcgaacgcgatcctctggccgtacggctgcggccgttccggcaggtcgggcacgtccatgtcgccctccagcatcctcagcgcctccggcatggtggggcggcacgccacggtgacgtgcgcgcacaggatcccgacgagcacgaacctctccatgccgtgcaccccggcggggccctcccgctcgcgcagcgccgcggcgaccacctccgccgcgcgcccggccctgacgagcgcccacgcccagtcggtgatcagcacgacgccggaggggtcggacaggtcgagcgcgcgccggccgctcatcacctccagcaccagcacgccgaagctgtacacgtcgctcttctcggtgagctgcccgtacagcgcgtactccggcgagaggtagccgtgcg

SEQ ID NO: 49 - DNA, 7018 bp, Oryza sativa
  misc_feature (1)..(7018): AB139664 5'-regulatory sequence
  misc_feature (1)..(1557): 5'-nontranscribed sequence
  misc_feature (1558)..(1747): Exon
  misc_feature (1748)..(7001): Intron
  misc_feature (7002)..(7018): Exon
tgcatccttacaaagagacagatagatccaatcgtacaattaaatcagtaattttataagagaatgaaataacattctagctagtgtatccaagaatgcacagtgaagtccgtatttaagtcccatccaaaacgatgtgatgttagatctgatccaaaatatttaataatgtagctcaagttttgcatagcccctgagaaccagacaagccaatgttaaaattcctactgtgcatagggagggcaatcaatcatcctactgcatgagtaggtccctgcttcctgttcaaaatactttctccgttctacgaagactacatttttagaacaaagctaacaaactaatggtgagagaagaaaaatcaaatgaacactcattaatacgaaaataaattatcgtcaaatgataacctaggaataattttgagttacagattaattataggtaagaaagaacaaagttaaagcgatcgaaaatgaagtctatttaaggaccagtttagtatggctctagctatagctccactcattctatagctggagtccaaccaaatagtttctacacctaaaatagaaatatagttggctagagcgttatcacaaaataaactagagaggtggagttgagttcagaccgctacacaacttcactttaaactttaactcctaaagttaaattttaagagatgaagatctactaaacaggctttaatacggaggaaatgcattcatccacaaaggtcaaaagcagcagaaagagaacgaatgcctttgctgcattcaacccaaagcagagctgcaggggtgccaactgccaatcaggcaatcatccactctgggagcgacaggcgacgccattgatgggcacaccccctcgccggggccgacgggagacgagacgacgcaggcactgttttgcggccgacccaagccaagccaagccaggagccatcccgtcccatcacgacgcattgctgccgcggcctaattgggcaggaaaagccatggcccacccccaccgcctggccagacgagacggcccaaaaaaggatcggcccagaaaagcccacgagagtacgacgcacgcacgcgtcgccgggaggcggggcccgggccggcgccgcctcgcccaatggccgttcgacagcggaggcgatcgaaaccaccccggtatcgccaaaccgcctcctcctcctccgacgatccggcgcgcgctccctttaaaatccccccatttcctcctcctcctcctcctcgtcgtcgtcgtctcccccactcgatcgatccatccatcgatcgatcggtcccccccatcgcgcgcgacgcattccgccgccgtctcgccgtgtccacgtgatgggggccggggctaggggataggcggatagccagcagccaccaccaccagtagttgccgtgtggggataggtgtggctatagggctagtggtcgtcgctgatagcgaggtgggtagggttaattttggttggaggtagagagagagagagagggagggaagggaggaggaggaggaggaggaggaggaggaagaacaggaggaagatggggcggggcaaggtgcagctgaagcggatcgagaacaagatcaaccggcaggtgaccttctccaagcgcaggtcggggctgctcaagaaggcgaatgagatctccgtgctctgcgacgccgaggtcgcgctcatcatcttctccaccaagggcaagctctacgagtacgccaccgactcatggtacgtacgtacgtacgtgtgcttgattaaatttcatcctcatcgcttgtctctaagctttcagttcttttcgcttaatcgagcaatccttgcgctacatgatgtgttcccgtttccgttctgttcgtatcgatcgattgcctttgaattctgtgtgtgattaattcgatctgtcctgattgctcgaattaattttgttgcgtgtgtttcggggttatccccaataatctgtttgaatttctgctgcgattgttgattgcttgccggcgatggaggaggcagcgtgttttgctatttcaggctttgagctgacggcgtgaggtgagatgcgttgcatctgtgcactgtagctacagtgcccgtacgagggtaattttatgctccgctttcgctggagagggcgttgctgctgcgctatttggggaatttttttttggccctgccgatgggtgctgcttgcttggcgacaagctagctttgcacccaaaggggagaggggtgattagctaggaactctagtacgtagatttgatggacctgggattatttggggattaaaatggtcttggcttgtgttcatctaaaattctactgaacttgctgcttgtgttgtgtgtgcctcttctttcttcactattccccatattaattctgggctcgtttagatcttctttctctctccctggccatctctttctcttgaggcaactaagcatattaagggagaagatgaaacgggatgcatcgggagatggaggagttcatatcttaagctgctggtgacttgttggaacccttttcgctggttcgtctgcctctagctttcttggactctttgctgatgcatgccatgcttttcagaacgaaaagattttactagaacaaacttataagctagggctggcctttaatctttacttcttaattcccggctgtcattagttcaatctaatggttcattagttgctgggttctacctttcctataaggttctttttgagatgtacatggtttctgaagaaacatccatgcttctagctagcctgattacagactggtttcatgctgcttcttttttatcgaaaagtcaccttgggggagagtttcccacttaactcattcgattttcttagttcagaggggaggtacaaaggttacaacattacatcggaggtctgttaagatgttaagacttagtaagaggtagagaggagttaacaggaaaaaaaagaacttataagctaaaggttcatcctagttagcgctttagttgctgggttctaccttttctgtcaggttcttcttgggatgtgcatatggttcctgaagaaacagacattagaaatttagaactaagaagcaaaacgttggatgcttccagtataccatatcatctgaaggatatttatccttcttgatgttttcgacaatgatttactattaatgcattgttatgcaagctttgttaagtcaacatgcaaatcttagagtttgatggttaattccagttcttatatattttttaagttaaaaattttcttatctctcctttttcctcactacatacgaatagagtttgatctggctgttataaattttcttcagttttgtgggcatccttatatctactaatcagactccccatatgatcagtgattatcagcttatactctattctaattctatgaatgaacgactaattaacttaattaactcctcgctgatttaatccaataagggtagtgtgttgggcatccccataatgctagcaaccacatctctagataagagtcattagtatcacatattttgaaatccttctcactctaaccattgatcagtgagttaagacataggagtagagcttcacgtgaggtaacagtgtttggatttcaaggtatcaagtttggggtgggagtacacgagccgatggattaatctgatttttttttcgtttctcgtacgtcattaaacgtcttatttggaaatcaactccattaggttcctgcagggtactgtagttatgctaattaatccttcttaagacttttccaagatttagctttaaacagatgctttcatgaacctagttgggaaacatgacaaatcctcttcgaactttaattaagatgttactttaattagcatgccttaagctggcatacgtagcggcaaatgcaaccacttacaattcatcacaaggcaatagatcgactggctttcttgttaaagctaagcaagtagttacctactgcgccaataagaatattgagcctactccattggtacgatgggtaatatttataaatgcttgtcgtttaggagtagcaagacactagttctttcatatttgtttgggtgccaatttagaaaactctccgtacttcaaatgtagtaaaatactctcctactgctctttggacgatgaacgtctacacagacaaacagtagtcatatttgaagtgactcgggagatattttaattctttttaactataagcagtagaattgtaaagttggtttcctccatcttaatccaatgcacgaagttcagaactctgctttgattaatagagctcgcagcgacttgcatgctgttttcacaacaagactcttgtagtattgcatctagccgtatatagatgagtcggcaatgagttaactctggctctcactgtctcacacgctattagggttccagacttccagtctacttgattcagaaaaatacaaatattctcttataagttagcccaaaataataaaatggatatatatttgcgggcattaattggtctaactatgctcggaggcctactggtccaactcgcgtaggacatacaaactcataaccgcataatatacctgttcagctatttggttatacagtattgagttgattcctgctgttgactgaactgtagcaacgtctgtatatatccgggactaatgataaattttcagtttggattgcattattcacaatatcttttaagcattaatactgtattaattctcttgacacttcatttttgtaataattttgttaattttccataggttgattaatttcaagttatcctatatacttatatagttcatctccactaagtgtagttaatgatatttctctcctcttattagactacattaccccaattatttctagccattggataatagatatatggttcaaattttctcttctttcttctctcattacaccaagtaatctcaatcatttttaggccttaaactcataagtatcaatttgttttagttttaatattcatatttcatcttatttgtacatattatgcaacttaatttcccgcagcaacgcggcagagtattcatttagttaatgtagacaacccaatatcacatgtgatcttacttgattatcattgattagaccctgtctaggaataagaagcaaatatgttctctttcaacaaagttatgtttgcttaagagtctagggtgttgtatttccccttaattctttctatagatagttatacttgctatcctgtttcatttctttttcttaacgaaaatgagatacagttcagttgcttaagcttttcttgacatgtatgcttgtattacatgtttaccttgactttgccccagaagtataccttctatatatatgcatattatctttccccaaaaggttatacagacccttttgaaaggttgacattttagtatgccgtagaaagtatatatcctttggttataaagtgaacttgttcaaagtgcctcaagaacatggaaatactttagcaaacaatgaagctactccctccatttataattcatttcatattataagttactttgaatttatttcctagtcaaactattttaagttcgactaaatttatagaaaaaaataaaaatatttctaacacaaaataaacattttatcaaatatgttcaatattaaatttaacgaaactaatttggtattgttgatgttgctattttttttctataaattggtcaaatgtaaagatgcttgacttgggaaaaagtcaaaacgacttgtaatatgaaacggatggagtaagacttaataatgtttcagaacttgaaccatatcagtgctaccaccaaaagctgatcattctgatatatgaaaatgtttattgttagctttgcccaaaaaaccgttttcatgaactgcataaatacaacaatttattgtttttttagggttctgtgtgtgggggggtggtgtgttaatccaactcttgtgttagaagtagattggcaaatctattctgtattatatcttacataagttcttataagaataaactgcaaaatgtaggtgttgttatttacaccactacgaagtacccccatttaaattttgaatgtataacaccgttgacttttatacatatgtttgaccgttcgtcttattaaaaaatacgtaattgtcatttattttgttgtgatgtgttttaagcatcaaaggtagtttaagcatgacttttttttacataattgcaaaaaagaatttgaataaaacaaatggcattttattatgggttacgcatttacatgtcataatatccactgtgacatttgagaaacctattcatgttttgaactagagattattagtagttgagggcctttgttagatgctgctagtcctatgattttggttagtacatgtatggcaagtgaaatcgtattgatattatattcccacacaatatgtaagttacttcaacacataaatatataacaatatctagttttgtattacttatatatatatattctcatcatagtgatagtcactaacttacctattaagacattcaaagaaatgggcatccttcagttaggatgttacagtgatacaccttttcgttttgacaatactgcatacgcagtttctaaaacaactccatgttaaaacataaggggttgcactcaagtagattttgaagtgtgtgtgcgcgcctgtgcaactttcttgttcttccttcgttttattttaaacctggaaactaaagtaggtttcctgttaaattcctatcctttcttaaaaaaatggacttcaagaaaaaacagaccagaatcataaatacagtgtatgtatctgacctgtatatgaaaaggtacagccatatgtgcatttgttgttgagatggaagaatatatatactgcttagttattattacaattatttcaaatgatgaaacgtatattcctcatttttcacagtatggacaaaatccttg

SEQ ID NO: 50 - DNA, 1372 bp, Oryza sativa
  misc_feature (1)..(1372): AF139664 3'-regulatory sequence
  misc_feature (1)..(372): 3'-untranslated sequence
  misc_feature (373)..(1372): 3'-nontranscribed sequence
taaggaggcttcagatccataccagtaatcacaagttgcaacctgacccggtccggtcgcctgctgctctggtttactactagtactattgtcatcttgcggttgcgagacgaggaaagcattttagccctaaattcagcattagtagcaagctgcaatgtgtatattttggcttcgtccagcaccgtcttcctcccaccagtaatttacccatgtaatatatgcgagtagcatgaacaaattttcccgtttccaaccatctccattggtgtcatgtgtgacttaaatagcgaaatttcagcattgtgcatagtgtgattactgtaagataaataaactttgtagacaataagtctccgttatcttgctgattggagctgaatctgtccgatcaccggcagagctgattgagcgcatactgcataacgaataaattgtatgcgaacaagttgataggcataaatcgttcgactgtttacaaagaaaataaggcgtgacattctcagttaaataatgggagatcatcttgtatataatgatcttctgccgtcactcctatacaaacattttacccattacaaaaaccaagaaatataccaaggcgcccaagctcactgtcactgctgactcccctaccactaaaaattctcaagagaggataacgaatgctaagcattagtcttctaagaatggcattcagaactgtggaactatgtgccggctgatgagaactcagcctatgaataaattaatctagccacaactttaacataaagatattggtcagaggttgtatttaactgaacagggatatgctagtattaaactcgaagcatcttctctttcaggcgtgaaatgaacttgaatgtctcctctgctttgacctgttgatacatatcacttcttgatactctgtccggatggaatttcaaaagagcttgcttgtaagcagctttaacctgaaaaaagtttcatattaaacaattgtcagcgggaagagatcaataattccttatttacatttatgggtatcattttatgaacttatatcagaacatggcataaggtggtaattgatctcgcctagattgccagaggcaataattggcaaatcttccaaaatttgtcatgagaagctatctcttctataaataaacaaacgaatttgggatttctccatagaaaattgaaatacaatttccaagtgcatatatctatctatgcatatgccacaacaataacaagtaataagttaattcactcgaagtaacagattcgtaagttggtttcatatggtacataaaacataactacttccatttcataatgtttgccaattttcctaagaaatgttgcttcacaatgtttatcc

SEQ ID NO: 51 - DNA, 7019 bp, Oryza sativa
  misc_feature (1)..(7019): AF139664 5'-regulatory sequence engineered
  misc_feature (1)..(1557): 5'-nontranscribed sequence
  misc_feature (1558)..(1747): Exon
  misc_feature (1748)..(7001): Intron
  misc_feature (7002)..(7019): Exon
tgcatccttacaaagagacagatagatccaatcgtacaattaaatcagtaattttataagagaatgaaataacattctagctagtgtatccaagaatgcacagtgaagtccgtatttaagtcccatccaaaacgatgtgatgttagatctgatccaaaatatttaataatgtagctcaagttttgcatagcccctgagaaccagacaagccaatgttaaaattcctactgtgcatagggagggcaatcaatcatcctactgcatgagtaggtccctgcttcctgttcaaaatactttctccgttctacgaagactacatttttagaacaaagctaacaaactaatggtgagagaagaaaaatcaaatgaacactcattaatacgaaaataaattatcgtcaaatgataacctaggaataattttgagttacagattaattataggtaagaaagaacaaagttaaagcgatcgaaaatgaagtctatttaaggaccagtttagtatggctctagctatagctccactcattctatagctggagtccaaccaaatagtttctacacctaaaatagaaatatagttggctagagcgttatcacaaaataaactagagaggtggagttgagttcagaccgctacacaacttcactttaaactttaactcctaaagttaaattttaagagatgaagatctactaaacaggctttaatacggaggaaatgcattcatccacaaaggtcaaaagcagcagaaagagaacgaatgcctttgctgcattcaacccaaagcagagctgcaggggtgccaactgccaatcaggcaatcatccactctgggagcgacaggcgacgccattgatgggcacaccccctcgccggggccgacgggagacgagacgacgcaggcactgttttgcggccgacccaagccaagccaagccaggagccatcccgtcccatcacgacgcattgctgccgcggcctaattgggcaggaaaaggcatggcccacccccaccgcctggccagacgagacggcccaaaaaaggatcggcccagaaaagcccacgagagtacgacgcacgcacgcgtcgccgggaggcggggcccgggccggcgccgcctcgcccaatggccgttcgacagcggaggcgatcgaaaccaccccggtatcgccaaaccgcctcctcctcctccgacgatccggcgcgcgctccctttaaaatccccccatttcctcctcctcctcctcctcgtcgtcgtcgtctcccccactcgatcgatccatccatcgatcgatcggtcccccccatcgcgcgcgacgcattccgccgccgtctcgccgtgtccacgtgatgggggccggggctaggggataggcggatagccagcagccaccaccaccagtagttgccgtgtggggataggtgtggctatagggctagtggtcgtcgctgatagcgaggtgggtagggttaattttggttggaggtagagagagagagagagggagggaagggaggaggaggaggaggaggaggaggaggaagaacaggaggaagaaggggcggggcaaggtgcagctgaagcggatcgagaacaagatcaaccggcaggtgaccttctccaagcgcaggtcggggctgctcaagaaggcgaatgagatctccgtgctctgcgacgccgaggtcgcgctcatcatcttctccaccaagggcaagctctacgagtacgccaccgactcaaggtacgtacgtacgtacgtgtgcttgattaaatttcatcctcatcgcttgtctctaagctttcagttcttttcgcttaatcgagcaatccttgcgctacatgatgtgttcccgtttccgttctgttcgtatcgatcgattgcctttgaattctgtgtgtgattaattcgatctgtcctgattgctcgaattaattttgttgcgtgtgtttcggggttatccccaataatctgtttgaatttctgctgcgattgttgattgcttgccggcgatggaggaggcagcgtgttttgctatttcaggctttgagctgacggcgtgaggtgagatgcgttgcatctgtgcactgtagctacagtgcccgtacgagggtaattttatgctccgctttcgctggagagggcgttgctgctgcgctatttggggaatttttttttggccctgccgatgggtgctgcttgcttggcgacaagctagctttgcacccaaaggggagaggggtgattagctaggaactctagtacgtagatttgatggacctgggattatttggggattaaaatggtcttggcttgtgttcatctaaaattctactgaacttgctgcttgtgttgtgtgtgcctcttctttcttcactattccccatattaattctgggctcgtttagatcttctttctctctccctggccatctctttctcttgaggcaactaagcatattaagggagaagatgaaacgggatgcatcgggagatggaggagttcatatcttaagctgctggtgacttgttggaacccttttcgctggttcgtctgcctctagctttcttggactctttgctgatgcatgccatgcttttcagaacgaaaagattttactagaacaaacttataagctagggctggcctttaatctttacttcttaattcccggctgtcattagttcaatctaatggttcattagttgctgggttctacctttcctataaggttctttttgagatgtacatggtttctgaagaaacatccatgcttctagctagcctgattacagactggtttcatgctgcttcttttttatcgaaaagtcaccttgggggagagtttcccacttaactcattcgattttcttagttcagaggggaggtacaaaggttacaacattacatcggaggtctgttaagatgttaagacttagtaagaggtagagaggagttaacaggaaaaaaaagaacttataagctaaaggttcatcctagttagcgctttagttgctgggttctaccttttctgtcaggttcttcttgggatgtgcatatggttcctgaagaaacagacattagaaatttagaactaagaagcaaaacgttggatgcttccagtataccatatcatctgaaggatatttatccttcttgatgttttcgacaatgatttactattaatgcattgttatgcaagctttgttaagtcaacatgcaaatcttagagtttgatggttaattccagttcttatatattttttaagttaaaaattttcttatctctcctttttcctcactacatacgaatagagtttgatctggctgttataaattttcttcagttttgtgggcatccttatatctactaatcagactccccatatgatcagtgattatcagcttatactctattctaattctatgaatgaacgactaattaacttaattaactcctcgctgatttaatccaataagggtagtgtgttgggcatccccataatgctagcaaccacatctctagataagagtcattagtatcacatattttgaaatccttctcactctaaccattgatcagtgagttaagacataggagtagagcttcacgtgaggtaacagtgtttggatttcaaggtatcaagtttggggtgggagtacacgagccgatggattaatctgatttttttttcgtttctcgtacgtcattaaacgtcttatttggaaatcaactccattaggttcctgcagggtactgtagttatgctaattaatccttcttaagacttttccaagatttagctttaaacagatgctttcatgaacctagttgggaaacatgacaaatcctcttcgaactttaattaagatgttactttaattagcatgccttaagctggcatacgtagcggcaaatgcaaccacttacaattcatcacaaggcaatagatcgactggctttcttgttaaagctaagcaagtagttacctactgcgccaataagaatattgagcctactccattggtacgatgggtaatatttataaatgcttgtcgtttaggagtagcaagacactagttctttcatatttgtttgggtgccaatttagaaaactctccgtacttcaaatgtagtaaaatactctcctactgctctttggacgatgaacgtctacacagacaaacagtagtcatatttgaagtgactcgggagatattttaattctttttaactataagcagtagaattgtaaagttggtttcctccatcttaatccaatgcacgaagttcagaactctgctttgattaatacagctcgcagcgacttgcatgctgttttcacaacaagactcttgtagtattgcatctagccgtatatagatgagtcggcaatgagttaactctggctctcactgtctcacacgctattagggttccagacttccagtctacttgattcagaaaaatacaaatattctcttataagttagcccaaaataataaaatggatatatatttgcgggcattaattggtctaactatgctcggaggcctactggtccaactcgcgtaggacatacaaactcataaccgcataatatacctgttcagctatttggttatacagtattgagttgattcctgctgttgactgaactgtagcaacgtctgtatatatccgggactaatgataaattttcagtttggattgcattattcacaatatcttttaagcattaatactgtattaattctcttgacacttcatttttgtaataattttgttaattttccataggttgattaatttcaagttatcctatatacttatatagttcatctccactaagtgtagttaatgatatttctctcctcttattagactacattaccccaattatttctagccattggataatagatatatggttcaaattttctcttctttcttctctcattacaccaagtaatctcaatcatttttaggccttaaactcataagtatcaatttgttttagttttaatattcatatttcatcttatttgtacatattatgcaacttaatttcccgcagcaacgcggcagagtattcatttagttaatgtagacaacccaatatcacatgtgatcttacttgattatcattgattagaccctgtctaggaataagaagcaaatatgttctctttcaacaaagttatgtttgcttaagagtctagggtgttgtatttccccttaattctttctatagatagttatacttgctatcctgtttcatttctttttcttaacgaaaatgagatacagttcagttgcttaagcttttcttgacatgtatgcttgtattacatgtttaccttgactttgccccagaagtataccttctatatatatgcatattatctttccccaaaaggttatacagacccttttgaaaggttgacattttagtatgccgtagaaagtatatatcctttggttataaagtgaacttgttcaaagtgcctcaagaacatggaaatactttagcaaacaatgaagctactccctccatttataattcatttcatattataagttactttgaatttatttcctagtcaaactattttaagttcgactaaatttatagaaaaaaataaaaatatttctaacacaaaataaacattttatcaaatatgttcaatattaaatttaacgaaactaatttggtattgttgatgttgctattttttttctataaattggtcaaatgtaaagatgcttgacttgggaaaaagtcaaaacgacttgtaatatgaaacggatggagtaagacttaataatgtttcagaacttgaaccatatcagtgctaccaccaaaagctgatcattctgatatatgaaaatgtttattgttagctttgcccaaaaaaccgttttcatgaactgcataaatacaacaatttattgtttttttagggttctgtgtgtgggggggtggtgtgttaatccaactcttgtgttagaagtagattggcaaatctattctgtattatatcttacataagttcttataagaataaactgcaaaatgtaggtgttgttatttacaccactacgaagtacccccatttaaattttgaatgtataacaccgttgacttttatacatatgtttgaccgttcgtcttattaaaaaatacgtaattgtcatttattttgttgtgatgtgttttaagcatcaaaggtagtttaagcatgacttttttttacataattgcaaaaaagaatttgaataaaacaaatggcattttattatgggttacgcatttacatgtcataatatccactgtgacatttgagaaacctattcatgttttgaactagagattattagtagttgagggcctttgttagatgctgctagtcctatgattttggttagtacatgtatggcaagtgaaatcgtattgatattatattcccacacaatatgtaagttacttcaacacataaatatataacaatatctagttttgtattacttatatatatatattctcatcatagtgatagtcactaacttacctattaagacattcaaagaaatgggcatccttcagttaggatgttacagtgatacaccttttcgttttgacaatactgcatacgcagtttctaaaacaactccatgttaaaacataaggggttgcactcaagtagattttgaagtgtgtgtgcgcgcctgtgcaactttcttgttcttccttcgttttattttaaacctggaaactaaagtaggtttcctgttaaattcctatcctttcttaaaaaaatggacttcaagaaaaaacagaccagaatcataaatacagtgtatgtatctgacctgtatatgaaaaggtacagccatatgtgcatttgttgttgagatggaagaatatatatactgcttagttattattacaattatttcaaatgatgaaacgtatattcctcatttttcacagtatcgacaaccaccatgg

SEQ ID NO: 52 - DNA, 1383 bp, Oryza sativa
  misc_feature (1)..(1383): AF139664 3'-regulatory sequence engineered
  misc_feature (1)..(382): 3'-untranslated sequence
  misc_feature (383)..(1383): 3'-nontranscribed sequence
ggaggcttcagatcggaggcttcagatccataccagtaatcacaagttgcaacctgacccggtcccgtcgcctgctgctctggtttactactagtactattgtcatcttgcggttgcgagacgaggaaagcattttagccctaaattcagcattagtagcaagctgcaatgtgtatattttggcttcgtccagcaccgtcttcctcccaccagtaatttacccatgtaatatatgcgagtagcatgaacaaattttcccgtttccaaccatctccattggtgtcatgtgtgacttaaatagcgaaatttcagcattgtgcatagtgtgattactgtaagataaataaactttgtagacaataagtctccgttatcttgctgattggagctgaatctgtccgatcaccggcagagctgattgagcgcatactgcataacgaataaattgtatgcgaacaagttgataggcataaatcgttcgactgtttacaaagaaaataaggcgtgacattctcagttaaataatgggagatcatcttgtatataatgatcttctgccgtcactcctatacaaacattttacccattacaaaaaccaagaaatataccaaggcgcccaagctcactgtcactgctgactcccctaccactaaaaattctcaagagaggataacgaatgctaagcattagtcttctaagaatggcattcagaactgtggaactatgtgccggctgatgagaactcagcctatgaataaattaatctagccacaactttaacataaagatattggtcagaggttgtatttaactgaacagggatatgctagtattaaactcgaagcatcttctctttcaggcgtgaaatgaacttgaatgtctcctctgctttgacctgttgatacatatcacttcttgatactctgtccggatggaatttcaaaagagcttgcttgtaagcagctttaacctgaaaaaagtttcatattaaacaattgtcagcgggaagagatcaataattccttatttacatttatgggtatcattttatgaacttatatcagaacatggcataaggtggtaattgatctcgcctagattgccagaggcaataattggcaaatcttccaaaatttgtcatgagaagctatctcttctataaataaacaaacgaatttgggatttctccatagaaaattgaaatacaatttccaagtgcatatatctatctatgcatatgccacaacaataacaagtaataagttaattcactcgaagtaacagattcgtaagttggtttcatatggtacataaaacataactacttccatttcataatgtttgccaattttcctaagaaatgttgcttcacaatgtttatcc

SEQ ID NO: 53 - DNA, 4411 bp, Oryza sativa
  misc_feature (1)..(4411): AF139665  5'-regulatory sequence
  misc_feature (1)..(1406): 5'-nontranscribed sequence
  misc_feature (1338)..(1338): y is c or t
  misc_feature (1407)..(1667): Exon
  misc_feature (1668)..(4394): Intron
  misc_feature (4395)..(4411): Exon
acctggggtttggaaatggggagcggcgcgagggaaccgagctagggagggatgggtcacggagggagagggagagggggccgtatggaagagtggtggctaagtgggtcagctgatgtctgatgggtcatgacggagtgggtcgggttggtaggaggcgttgcaagaggccagttggactgtgtttggatcgaagaattgaggatttaggtgcactaatatgtgtacatgtgtatatactaaaagtatacttgttttttgataaaaaagttgggtattcccgggaatacccaggaatcatggtagctccgcccctgtgtgtagccaaaggtcatttacctatctgcaattttgcaatcaaccacggtagcatagcaatacaaagccacaaggtagttcatttttcttgggctgtggagaccagttaatctattactccctttggttctatattaattaatgttttagacaaggttaaggttaaacttttataactttgaccatcaataactttaaaaatatttagtttaaagaaactagaaaaacatatatagatttgtctttcaaaacactgtaataaaagtaaacatgtatttatttattgtatatattataatagaaaaataagatccaaggtatatcttgtagagcgtgtcattgtccaaagcgtcaattaaaatgaaaccggagggagtatcttaaaaaaaaaaagtctagcctttttctacggtcttgttgtccgctccttctattgttgcaacacgaactctcttaaaaaaaagaaaaaaaaatctttcaacaccaacaaacaaacgctggtactcccagtacgtgtattgtactactaggtagtactcggtgccaaacagtttggcggctatacggagttgagtagtacaaacagaaatactcgtatcgtatcggaatttctaaaaagaaaaaaataaaataaaagaaaaacctgtactggcaggtgggccccacccgcccgcttcgacgaccacacgtgggctcgccacgtgtcatccggcgtctcgtttccttgtacccgacacccccctacgttgtggaaaaagaaaaacccatccctcacgcgagcccaccgcacccgcagtcacagacaagcgggccccatccgacccaccgaccaatcccgagcgcgagcccgcgggtgcacgggttcgcgcgcgccgcgtggcccgtgggccccaccgggccagggccgcggtaacgacctctctcctgatccgacggccgggatccctccacgccgccccgaaaccgcctcggccaatcggaaatcgacaacgaggcactcgaaaccgccctggtatggccacaccgcattccacccccatctaaaaccgccttccctccccctccctctytcttcctccccccatttccatcttccccgagctctccaccctccacccgccaccgccaccgccgccttcgccgccgccgccgccgccgacgacgatggggagagggccggtgcagctgcggcggatcgagaacaagataaacaggcaggtgaccttctccaagcggaggaacgggctgctgaagaaggcgcacgagatctccgtgctctgtgacgccgacgtcgcgctcatcgtcttctccaccaagggcaagctctacgagttctccagccactccaggtacgcacgcgcttagctcctcctcctcctcctcctcctctccgcgacctcccgcctacctacgtagtacggcccatgcccgtcgcctttcctcgccgcgcgcgcgccatgggcgagctcgcggagctccccgttcctgggcggcttgttgatgcgttcgatttcgtttcgtacgggttcctgccttgtgttcgatcgtttccgctgcggaatgcgagggggctggtggtgttggtgcgtgtacgattgctattatttcgtgctgattgatttctctcatgtgctctctgattgcacatacggttcatggctttgtacgtgttcgttcgtgcgattgctgcttagctcgggatggagttgctcgcgaagtctagctagttgtaggttgcttgtgtcccctggattacagctctctatgtgatgctggcatgctgctgctgctgctgccatgcatatcagaagctagtaatatacagtggtggtacatgcactgttgctgatttagctttatatgctgctcagttttgttcttggggactcatcaatcatcgtagcattggtgaacacgttcacttccatttttttttgtataaaaaggaatggaataataggtgaaaaaaaattcatgtgcttcatcagtacgggcggaaagaaagatatgtttaaattttaattagtgtgcttatctaggtttatcatatgcttatactcttgtgtactgtagcatatacaagtgatgcttattaccaaagcctagctaggccggtaaacttgtattatttgtctcgttatttctggaaatcattagagcagcacttcagttgaaatatgcacggacgccttgctaattaagcggctcctctaaccaggccagtaaggtcttaagttactgacaactcctggactggtataaatggcgcggccagctttacatgacatatggtttgatacttttgtttagttaatttcgaggtggaatataaggtgaccagcttacttaacttgttcatttgatgcattcggtttcatttccctttttttttttaagataatgggaagtaaattaatacccggccttgctttaactgaaactacaactttcttttgtccctttagtgtgtactgtcaccaagttagctatacatggtgcaagttgccattgcccattgctattaacttgctctcacaaattggggtgtttatttcttgaaatggattttttaggacaacaataaactgattgacatagctatactgttcaagtataaccatgtttatggttttcaattaagcaaactgcttatgtttatgctaatatcttttgtttaatgggaggaatttaaatatttcattattggtattcctatactctattatttcataatatttggcaattttgaccggtgattgcttcagtttaaccattaatatcttttaaaatttatgattatgatggatgggatttatatctctatatttaccattaccatgtaacatactttaataatatgttacataatctaatactaaaagtttatttataaaattggaatggccaaactaaaacaatgcgaacttaaaatcaccaagtattatgaaatggagggagcataatatcagtagctcgtaagggaaaaaagggacctaaatgatgccttttgtgataaatataatttcaaatttgcaaaatttttggataggcaacaatactctctcattattgtgttagtattaaggtcaagctacttctatgctaccaaatactccttctgttcctttttttatttcttgtctaggatattgacattatccctaacacacatctttctttgtatgatcatctactcataaaatagttaaaatataactacattattcaattatgaatctatgaatgttatttttatacaccgagttgggaactattctaaactctcgaggggacatcccctcattatctgcatgttatccaaacggttgtgaaaaaaattgaaaaaaaataaacaagatagattaatatgtgataaatcactccacaaacatgcaaggacaaattcaaattctacaagttgcaatgaaaaaattaaatttgaccgtgaatatacattaactagccatagtttaatttttttttgttgtaacttgtagaagttgaatttgaacttgcatgtttgtgaagtaatctatcacatattaatctatcttgtcgatttttttttaaaaaaatcataaccatttagatgacatgcaaaaaacgaggggatgttcccttgagagtttagaatccattctccagtgagttgatgttgagatttgattacacatttcaaaacgacttttatttgttaacgaagggagtaatgtggattcaccatatgtactaatgttattaaggccagataatcctttttttaatcattctaattagatataaacttacgacgaagaacatgaatggataaagtttcagccaacaaatacaaatgtttttcaaagtgctatttctgatgcataatttttgtagcagttatgatttaaatttatacatggataatttgaataatggatcctacttttgtagttgtcacctgacaagccttaagaattattgagggtacaaaaattataactgtgcatttgtttgatattgctctaagactatgcttggcatcatcttttgatgcattggtcaaaccaaagcataatcatgtgatacttcttctgtagtatggaagggatccttg

SEQ ID NO: 54 - DNA, 955 bp, Oryza sativa
  misc_feature (1)..(955): AF139665 3'-regulatory sequence
  misc_feature (1)..(359): 3'-untranslated sequence
  misc_feature (360)..(955): 3'-nontranscribed sequence
tgaaggcatctgttgatctcaaacgtcactccactcaatggccaacatcaacatgtttcttccaactaaggcagccactgttgtgcaatccatcttccagcgatattgatatatcggcattcggcatagccaatatatattaatgtaatgtatcttgtcaaagcttcatagggttaatgacgccttgagcttctctgttctatatctgtcttgtaacgatctttgcatatctgctgcatttttttttctctctgatcgatgagtagtccttggtccgagattgtagagccgtgtatgtttcctctcgtcgttgtgctctgtatgcaatcgacggagatgtggtttaacttgtctcacctgctgtgatttcctttcatctgttcttcagatgtaagaaaacgaacagcgccaccgccttttcaaggattaaaagagtaggattcagaactttttttttagagaggagaatcaaaacgcttcctggttatctgaaatctgatgtcagatgccttaaacccttgactgaaagggaagtggttatctgaaatctgatgtcagatgccttaaacccttaactgaaagggaagaggtttgtcagctctgtttcaaactgtatcactgtcatcttgtccgaatctcaaggaaaaaaaatctcttctcatatactccatcttaaaaaaaactcaatttctgaagtttaaattttgtcaaaaaaaatcaacttctactgtcctgcctattttcagcacgtaaaacgagaagttttatcccttaaataccgtttacatatctatcatcattactatttttttttaaataataagggacattttagttgtctttactcctcactaaatttgcattgggatgctaagaatgctctttttatgggacggagggagtattgttccatagcaggttaatgctaaggctgagttcccgaggtggagttcat

SEQ ID NO: 55 - DNA, 4412 bp, Oryza sativa
  misc_feature (1)..(4412): AF139665 5' regulatory sequence engineered
  misc_feature (1338)..(1338): y is c or t
acctggggtttggaaatggggagcggcgcgagggaaccgagctagggagggatgggtcacggagggagagggagagggggccgtatggaagagtggtggctaagtgggtcagctgatgtctgatgggtcatgacggagtgggtcgggttggtaggaggcgttgcaagaggccagttggactgtgtttggatcgaagaattgaggatttaggtgcactaatatgtgtacatgtgtatatactaaaagtatacttgttttttgataaaaaagttgggtattcccgggaatacccaggaatcatggtagctccgcccctgtgtgtagccaaaggtcatttacctatctgcaattttgcaatcaaccacggtagcatagcaatacaaagccacaaggtagttcatttttcttgggctgtggagaccagttaatctattactccctttggttctatattaattaatgttttagacaaggttaaggttaaacttttataactttgaccatcaataactttaaaaatatttagtttaaagaaactagaaaaacatatatagatttgtctttcaaaacactgtaataaaagtaaacatgtatttatttattgtatatattataatagaaaaataagatccaaggtatatcttgtagagcgtgtcattgtccaaagcgtcaattaaaatgaaaccggagggagtatcttaaaaaaaaaaagtctagcctttttctacggtcttgttgtccgctccttctattgttgcaacacgaactctcttaaaaaaaagaaaaaaaaatctttcaacaccaacaaacaaacgctggtactcccagtacgtgtattgtactactaggtagtactcggtgccaaacagtttggcggctatacggagttgagtagtacaaacagaaatactcgtatcgtatcggaatttctaaaaagaaaaaaataaaataaaagaaaaacctgtactggcaggtgggccccacccgcccgcttcgacgaccacacgtgggctcgccacgtgtcatccggcgtctcgtttccttgtacccgacacccccctacgttgtggaaaaagaaaaacccatccctcacgcgagcccaccgcacccgcagtcacagacaagcgggccccatccgacccaccgaccaatcccgagcgcgagcccgcgggtgcacgggttcgcgcgcgccgcgtggcccgtgggccccaccgggccagggccgcggtaacgacctctctcctgatccgacggccgggatccctccacgccgccccgaaaccgcctcggccaatcggaaatcgacaacgaggcactcgaaaccgccctggtatggccacaccgcattccacccccatctaaaaccgccttccctccccctccctctytcttcctccccccatttccatcttccccgagctctccaccctccacccgccaccgccaccgccgccttcgccgccgccgccgccgccgacgacgatcgggagagggccggtgcagctgcggcggatcgagaacaagataaacaggcaggtgaccttctccaagcggaggaacgggctgctgaagaaggcgcacgagatctccgtgctctgtgacgccgacgtcgcgctcatcgtcttctccaccaagggcaagctctacgagttctccagccactccaggtacgcacgcgcttagctcctcctcctcctcctcctcctctccgcgacctcccgcctacctacgtagtacggcccatgcccgtcgcctttcctcgccgcgcgcgcgcgatgggcgagctcgcggagctccccgttcctgggcggcttgttgatgcgttcgatttcgtttcgtacgggttcctgccttgtgttcgatcgtttccgctgcggaatgcgagggggctggtggtgttggtgcgtgtacgattgctattatttcgtgctgattgatttctctcatgtgctctctgattgcacatacggttcatggctttgtacgtgttcgttcgtgcgattgctgcttagctcgggatggagttgctcgcgaagtctagctagttgtaggttgcttgtgtcccctggattacagctctctatgtgatgctggcatgctgctgctgctgctgccatgcatatcagaagctagtaatatacagtggtggtacatgcactgttgctgatttagctttatatgctgctcagttttgttcttggggactcatcaatcatcgtagcattggtgaacacgttcacttccatttttttttgtataaaaaggaatggaataataggtgaaaaaaaattcatgtgcttcatcagtacgggcggaaagaaagatatgtttaaattttaattagtgtgcttatctaggtttatcatatgcttatactcttgtgtactgtagcatatacaagtgatgcttattaccaaagcctagctaggccggtaaacttgtattatttgtctcgttatttctggaaatcattagagcagcacttcagttgaaatatgcacggacgccttgctaattaagcggctcctctaaccaggccagtaaggtcttaagttactgacaactcctggactggtataaatggcgcggccagctttacatgacatatggtttgatacttttgtttagttaatttcgaggtggaatataaggtgaccagcttacttaacttgttcatttgatgcattcggtttcatttccctttttttttttaagataatgggaagtaaattaatacccggccttgctttaactgaaactacaactttcttttgtccctttagtgtgtactgtcaccaagttagctatacatggtgcaagttgccattgcccattgctattaacttgctctcacaaattggggtgtttatttcttgaaatggattttttaggacaacaataaactgattgacatagctatactgttcaagtataaccatgtttatggttttcaattaagcaaactgcttatgtttatgctaatatcttttgtttaatgggaggaatttaaatatttcattattggtattcctatactctattatttcataatatttggcaattttgaccggtgattgcttcagtttaaccattaatatcttttaaaatttatgattatgatggatgggatttatatctctatatttaccattaccatgtaacatactttaataatatgttacataatctaatactaaaagtttatttataaaattggaatggccaaactaaaacaatgcgaacttaaaatcaccaagtattatgaaatggagggagcataatatcagtagctcgtaagggaaaaaagggacctaaatgatgccttttgtgataaatataatttcaaatttgcaaaatttttggataggcaacaatactctctcattattgtgttagtattaaggtcaagctacttctatgctaccaaatactccttctgttcctttttttatttcttgtctaggatattgacattatccctaacacacatctttctttgtatgatcatctactcataaaatagttaaaatataactacattattcaattatgaatctatgaatgttatttttatacaccgagttgggaactattctaaactctcgaggggacatcccctcattatctgcatgttatccaaacggttgtgaaaaaaattgaaaaaaaataaacaagatagattaatatgtgataaatcactccacaaacatgcaaggacaaattcaaattctacaagttgcaatgaaaaaattaaatttgaccgtgaatatacattaactagccatagtttaatttttttttgttgtaacttgtagaagttgaatttgaacttgcatgtttgtgaagtaatctatcacatattaatctatcttgtcgatttttttttaaaaaaatcataaccatttagatgacatgcaaaaaacgaggggatgttcccttgagagtttagaatccattctccagtgagttgatgttgagatttgattacacatttcaaaacgacttttatttgttaacgaagggagtaatgtggattcaccatatgtactaatgttattaaggccagataatcctttttttaatcattctaattagatataaacttacgacgaagaacatgaatggataaagtttcagccaacaaatacaaatgtttttcaaagtgctatttctgatgcataatttttgtagcagttatgatttaaatttatacatggataatttgaataatggatcctacttttgtagttgtcacctgacaagccttaagaattattgagggtacaaaaattataactgtgcatttgtttgatattgctctaagactatgcttggcatcatcttttgatgcattggtcaaaccaaagcataatcatgtgatacttcttctgtagtatcgaaggccaccatgg

SEQ ID NO: 56 - DNA, 952 bp, Oryza sativa
  misc_feature (1)..(952): AF139665 3'-regulatory sequence engineered
  misc_feature (1)..(356): 3'-untranslated sequence
  misc_feature (357)..(952): 3'-nontranscribed sequence
aggcatctgttgatctcaaacgtcactccactcaatggccaacatcaacatgtttcttccaactaaggcagccactgttgtgcaatccatcttccagcgatattgatatatcggcattcggcatagccaatatatattaatgtaatgtatcttgtcaaagcttcatagggttaatgacgccttgagcttctctgttctatatctgtcttgtaacgatctttgcatatctgctgcatttttttttctctctgatcgatgagtagtccttggtccgagattgtagagccgtgtatgtttcctctcgtcgttgtgctctgtatgcaatcgacggagatgtggtttaacttgtctcacctgctgtgatttcctttcatctgttcttcagatgtaagaaaacgaacagcgccaccgccttttcaaggattaaaagagtaggattcagaactttttttttagagaggagaatcaaaacgcttcctggttatctgaaatctgatgtcagatgccttaaacccttgactgaaagggaagtggttatctgaaatctgatgtcagatgccttaaacccttaactgaaagggaagaggtttgtcagctctgtttcaaactgtatcactgtcatcttgtccgaatctcaaggaaaaaaaatctcttctcatatactccatcttaaaaaaaactcaatttctgaagtttaaattttgtcaaaaaaaatcaacttctactgtcctgcctattttcagcacgtaaaacgagaagttttatcccttaaataccgtttacatatctatcatcattactatttttttttaaataataagggacattttagttgtctttactcctcactaaatttgcattgggatgctaagaatgctctttttatgggacggagggagtattgttccatagcaggttaatgctaaggctgagttcccgaggtggagttcat

SEQ ID NO: 57 - DNA, 18599 bp, Oryza sativa
  misc_feature (1)..(18599): AF141964 5'-regulatory sequence
  misc_feature (1)..(2045): 5'-nontranscribed sequence
  misc_feature (2046)..(2353): Exon
  misc_feature (2354)..(18582): Intron
  misc_feature (2377)..(2377): n is a, c, g, or t
  misc_feature (2381)..(2381): n is a, c, g, or t
  misc_feature (2730)..(2731): n is a, c, g, or t
  misc_feature (2733)..(2734): n is a, c, g, or t
  misc_feature (2737)..(2737): n is a, c, g, or t
  misc_feature (2739)..(2742): n is a, c, g, or t
  misc_feature (3144)..(3144): n is a, c, g, or t
  misc_feature (11224)..(11224): n is a, c, g, or t
  misc_feature (11558)..(11558): n is a, c, g, or t
  misc_feature (11574)..(11574): n is a, c, g, or t
  misc_feature (11930)..(11930): n is a, c, g, or t
  misc_feature (18583)..(18599): Exon
aaaacactgattaaagggttgttgaaaggaaaacaccggcaataaaaactagcccaaattaaatttactctaaaaaaatttactcatagcacggtgataaaaatttaagaaaagacgaaaattgtctgcattagccatgcatgtatacatatcactgcaaatgttactgaaagagacgtttcaagtgcatgtgtctctttatcttattaaaataaattctaataatatccactttaggtaatcaaccaagcacggagcactaaaaaaaattatgctggtgcccagcttgtctctttttgaaacaaaatataagtattaaaaaaagtaccgtattatcaaatttggttacatgctaaacataactaaaatactttcgttaattgcatccaaccattttaaaattacttttggtaattgtagccagccatttttaaaattatctgtagttaaaatcgaagtaataaaactcaagattgccaaataaatgcaaacggtaagagtatgaaaaatcagctatgattgttggcgggaagaagtttcgggtaaaagaaaattagatgtgcatagatctggaatgagggaaatagaaaaaaaagcctaattctaatgtggatcgttaaaaatcacaaacacaaacattttttagtaactcgtttcaatatcttttaagtctttcaaatgccactgacatttacaattttaaatcaacacatatgcacatgaatgcgtccttttcatcaaactaaaggtatgatatctgtttatttgtaaatataatactacttttatgcgcacccaaatttctcataagggaaagagcagcgttactagttttagaaagggacaaaacattaacatgagagcgaatcgtttgcatggtgtgcgcaaagcatttattcctaagttggggggggggggccgggggaagttggggaaccgacctgtgcaagttgccatctgctgatgtgcaaacggagcaatttaagggtaatgctcttctctgattttagaatttgatttttcatttgacctgccatgccattcaaactatatatttctataaaacaaacttaaataaatttaattaaaaaaaattaaaacaacttataatataaaacaaaaaaaagtaaaatataacaacacaggatagtgagagacatatcctagtggtataaatctagacgtgtcaagttattatgttttgggcggaggagtatgatatacgtactccctgtgttctataataagtttatttttagcttcttttatttgtcctaaaataaatttatttttaaagtaattattgcatccgagtttatgaaagtatgaaataattatattgagagtagatgaaatagaaaaaatagttgctttggggatttgatacattttttttgggggggtattctagtaattttgattttgtattggtatgtgtggaataggtgaaaaatgaatttattttaagacggaggagtaattcgcatacttttcctttttcaagcaataataaaactgaagtacttgagaaaataattatgagagtcagaggcagtccatgaacacccagagtcccagagtgctcttagcaaattaattatttaccactataaaatttagcaatggttgccaaaagaccaacttgcgtaaacagaaaaaagtactagtatgacaccgaaatgatgccaacgttttactactgctagctaccattgctagtttaaaccgacatttgtggtggtagtgtagatgtgtgtttagctgggagaaagcatctccctacggacacccagagtgctcaataagggaaaggggaagcgttactagttttagaaaaggacaaaaacactgacatgagagggaggcttttgcgcttgcgtgcgcagagcaaaataaaggactgggaaaccgacctatcagcgggggtgtaaaagacggtttggcttgggagcccccgataaatagccccggcaacgcggcgtctgaggtgtacatccgcctcgtcaaatgggggccccccacgcgcgcccatcgatcccctcctcctcctccccaacttctccccaccaccacaccaccacacacacgcacgcacgcacgcacgcctccgttttccccaaccgacgagaggcggagagggaggggagctagggtttttcggggcggggatggcgcggagggggagagtgcagctgaggcggatcgaggacaaggcgagccggcaggtgcggttctccaagaggagggcggggctgttcaagaaggcgttcgagctcgccctgctctgcgacgtggaggtggcgctcctcgtcttctcccccgtcggcaagctctacgagtactcctcctccaggttcgctctctgattccatccccntccntccccccgcctcctcctgttgttagtttgttagttacgatcaaaacccagccgcggccgaatcgagaccccccgccgcggcaggatctgccgattggttccgatcccatttcgttctgctatcccggatcgatcgatgattctccctgctatactgtatcgtaatgggtaagcctagtgcacgccatgtgctcgagactatctcgcagagaccgccacccaccggcgttgcgctgcatgacagccctgtgatttctgattagtaggatcttgttctcttagcctgtacagtagcagcagccagcagcttgtatctagtatatgaagctttgacaccttgtactgttggnngnngancnnnnaaccccccaccgcgggctactggcgctgcattgacatgcccctgtgaatttctgattagtaggatcttgttctcttagcctgtacagtagcagcagccagcagcttgtatctagtatatgaagctttgacaccttgtactgttccgcgcttcgtctccccgacggcgtgggccgcgttgtttttcctcccctggtgtgcttttacacgtgtttcgcatgaggagacaccagccttcgtagaggcggaggcgcgcagcaatacgcgcatcaccctgagagccaccgcagtgtacggcctacggcgagtgaggagtttatcattttctcccaacttttttttcggcatcttgttttttttttctctgagagggagtgatgaaggagtacagttgtgtgtgtttnctttaatttatttcagcgacagggacgaagtcggcttgctctgtagcgaccggcctattctcataaatagtcttttgttatggtattgagtggcatatgttaaataatattatttgatacaactgcttaaagatttttttgtaatggcttatttcttgtattttagtgtacacatcgaacaggactattcttagtgatatagtagtgggataacatatttatctaattaacctttattaatgatatactataaagaacattgataatatatttatatatgtcaagcaacttgattgaaaaacaagcacatcactcacaaagttagcccaattgtgcacaatagtccatttcataccatgatgctaaaaatcgcgcgctctgattgtttgagcgacaacccagaataattcataggtataatattttatatatatattaagtggtttaaaaaccaagattgaaaaatagacctcaataaaaaaaatgccccctaaaatcaactctcaaggagaaccgcgtttggctttggccgataatccacgaacaaatgatgaaatcacatattccatatattcgcattcacttatgaacaaatggcaacttttcttatttcttggtaatgtacgccctacacattttccaacccacatttttctagttttgcaccccctccaccaccaatatggtacaactacagctccaaaatttagctccaggagttaggtctggagtggagttgcctaaatccagttccacaactctagtttattttgtgcgagcttcacccagcttcactcccaattttaatggagctgtaattgtttggctgagctccagctccaagagaagtggagctagagctggagctgtgccaaacaggcccttagcttgtccaaatggtctagattcttatttcagattctacgagtcagaaggtgcataatcaataatcaatgaactggaagccagaagttggataacgtaagcttcagctagatactcaccaattgctttttaggatctgtagctttcttaaatagggcatttcctatctttaatactccatatgtcccaaaatataacgacttttagcctttagaatttgttccaaaatattacaacttctccaccaacattctcttctcaaccaatcacaaccctccaccattcaatttctccacctacattcatttctcaaccaatcacaatcttccaccatttaattctacttattttcttaataaccgtgaccaactctaaaactcattatatcctgtccgtcccaaaataagtttatttttcacgcatctcacgcgtaccaatatctaagaaaaaaaactagaatacattcacttcatcaaattccaatgcagttgttcctcactttatctactcctaatgtattttccccctacttttacaaactctgttgcaataattgctaaaatatgaacttattttgggataaatgggaggggctaaaaatgatcttattctgggacggatggagtagatgcttcttgtagcatatgtttttgaatttaactaccatcaagttccaccacaacatatagaagtatcttgtagtaaccgttattttgctattttgctaatgaaatagactagaggcattttagcttgccttgcacacgagtgacaagtaaactagaacggaaggagaattttattccccctcaatctgaccaaatcgatccaaagccataccagtgtatgattttccttactaaatgtgaggttgatctttcactaacaatgaataaactcctctaaattttgaactaggatgggacaatagacccaaattaacataaaactaggaaatcaatgcggcgatgtttaagtaatgaccatgattgtagacaacaaaataacacaaaattgataaaataactcgtacatgtatgtcatagattatttaatatttgttgggtcgtccccttcatgtgttaaatcatctaggaatttgtcctaacatttgggataaaaaatttcgctaataaatctattgaacatctaatgtacgacaaaagtctctatgacaacccactattagaaattggggcatatagatctccagcaaaccttaacattttattcaagggtttgtccttgaatacatccaggcaaaatgttgaggatttcaatcaaagttcgggccattggatttatttgacgcgtatcttaatggttaacatgtgccctacctcttcttaccttttcttgttatctcactattgaagttgtccatggttactaatactcaaagcctagaggctatacacgcactacctcctgctattccatatcacattctaaccacaatgtctacggttattacttattagctatgtttgcaatgcttcgggcttgcattcaactaagatagcaaaaaaaagtgttaaagtgttaaaaaatccccacaattcccggcacacgagggggtgggggttaaaaatccccttgaatataatttgactaggtatctcttctttgttggcttagaagatttagttgtgtttagtacttcatgaagttatggctatcactacaacttggtcaagtttgatttcttatctagtttgttgccatactaattaaagtgttgcattttgaaatgcacccaaagaagtgaattatgcacacatactagaatcattaacaatcgtttttaaacttgttttatgaatactaatatgtattttatacgcacgtaagacccacataatatgctgaccatatatgtgataaattatgaatgatcttatatcttttatactcccttcgtttaaaactagagggtgtattatgattttacacaatctccaactttgaacattaatttcttttgctataaattatcaactacaaaaacaatatcatatgagagtattttttaaatttgaatctaatgatactacatgtgtagcattaacaacatatttttgtttaattatcagtcaaaattttaaaatggtgattttacagaaaacaacgatgtcatatatatattagagcggatggagtatgttacaaacaaactaactagcatcattactacaaagcttgtccaaggttgaacaaaatcatctcaaaagctctaaccatcatatcattccctcaaaaggcacaaatcattccttgctagactgcttcctatgagtaaattacatcgagcagtaatgtttatcagttatctctatgcacaacctaataatacatcatgcgagtccacaacctttttgcctcctgccaatctatagtattacataattattagaacatagcatatgccattgtttttaaaattcttcctaaatattttaacaaatcaattctaaatatgttagaacatctattataatgtttcaacaatgcacatagtttcatctggtttccttatgcctctccgtagtcggatcattgatttgtcttacgacattaacaatgtgaagtgcaaaggtgctcccagggagaaaacaagtccacataatctagcgtttatgaaagagatgtttatctagttagtaaccaataattctgatattggttttcccatgggtgtgatggatattcattgcaacttacaggcaaataatattgtgcattttcttatttcgaaaagatatcgtacggatgaaagtacatgcatacacttttacacaatattatacaaaattaggtttgcttttcttatcttcagtcttataatataaacatgcaagcatatacaaaatattatctcaaaaatttataatcaacttatgtcaaacatgcaagcaaggatgttgacaagctttaaagtttctttttaaaaaggtcacacttatctgaaatgatcccaattatctcattagtttggatactatattactcctaaggcatgccaaatttataattaacctgacggggttaattttttacattatgattgtagatatcatgaaaacatgtgcttagattattattaacctagaaaaatatgggtttcactattttagttcatagcgtacctgtagttcacacaaaaagtaaatagtattgaggcaactttcaaagtttagatataaagagaagacatatgcaagatattttaaaatataacctttttttggccaaaaaagcactgttattctatgggatcgccaatcacacttaaccatgcaaatatgcaatttgcattgccataagatatttgcactaccatttgtcgcatatttcttacctaatttgcatctctacctttggaccacaaactcttagtctacaactgcacataccactatcaagcatgccagaaggtatgatgtgaggactatcgcaaatcacgtctatagtagaaaaaaaaatcatgccatataaggttcatggagcacatgaaggcaaccatgatatggatgatgatgatgaccattaaatcttctttagggatttggtgcgtactagtagtacgatttaggtattattagtcttgcttcatggaagtacaatttaatgtcaacatcaccatagatatgctaatcaactagagcaaggctgataatattttcaaaataattatgggcacaaatagatgacgaactcttagatgaacttaaggggattgtggaagacaacaattgtcagacgttgatgaagatccatgcatttgtttttatatgtatcttgatcattcatctatactaatataaaagatgctagcggtggaatctatcatcaccaccacccaactacgatgttagaccccgcaaacagtgagtctttccgtattccccaacccctacaagccatagaccctaagacctctagctcaattggcacaacaaaagtaacatgataataatatattagtcaatacaaataacatttttagggacttgaaaatatatacaaggagccattttttcttaaaaggcatgtgcattatgctattatgattgataagcataactgatatgccacacatgaagtatttttcatacggcctaatgatggattaatactaaccaaataaattttgtaaattatgattattaattatataattgtccttattagctatctcgcggaaattcctatgtttcaaaaaatctgcatcaccaaactcttttgagggaccaaatatgcataacatctgacttatacttttgtcatttctccatgtgaaagtgttaagtcaaaagtactataagaacatgtggatttatgtaggccgctatctatctagactctcaatgtgaaattaatcacacaaacaccagaggccatatgggtctctactaccaagctgggtatcacattcacacccagtgagctcacaccttttgtctatctgaatcaaacttttttttaccataatgtgttcttcctactatataccaagtatattgttctaatcttagatggaaaaataaatagaaaaataatctaaaaagatggatcctccaccttcattatgagtaatgaactaggtgctgatacaataaaaagagttgactagattaaccggaatagagtctagtctctagttgcctaagagcaacccatatttatccattccaaagtaaatctactgcctgagaccatctctctcccaagaacatatgcacctgaatgtccagaagaccaaaaccagcccatggtccatggtacactattaggctatataatatccatcgtcccaaatgcacatgtttgagtagaatttttttatttagacctttttaataaataattttaataatagacctcgtcgaaacttatttccaaaaatgagccttttggctatgccgttggaactggcgtggccaaactcttttgccgcaccgttggtcccagcgtggcacctgctacctcgtagctgtcatcgtgttgattaagtgaacgccgacgtaccacttcctgtcacaccaggctcattagtgttgcagctgccaattgccacgcctggctcgatggcatggcagtgtcctctctcaattcttcctcccatcctgtgagaaagtaattttcattgggagatcgatattgttaggatgtattttcattattttgttagccattgtggtttatagatgaacatgacaagtttatagttacaaatttggcacataacgagtaaagatcagatgaagtattagcggtatttgtgaggtattgttagaaaattccacaataacgaatggtttggatggtccattttagaagtgttttgatggacttgatttatgtgttaaagatatgaatggttcaagcattgttgtttttgtctttaatacaatttagatgggtggaaatgactaaatccctcgtaagcaaccatcggttggtgtcgtaggaagagaaatttctagcacacgttgtaacaaccacatccatagaacaaacttgtgatcttgaaacgaatgcaacatacgtcgaccacttcaactcacatgatatgagcatcgccacaaagtatttccttgatccaatccctgcaaccttccattcttggcatgtccataggttcgacatgttgcactttagatcagacccgatcacatgattctacccatataggattggtcgtaaacactaacatgtctacttccataccatcaaactttctatttgcactaatggttcaaccgaaatatacacgcaccccaggatctatctacatgcataatattcacatgcaaatcaaatactcattatagaaccacgtgaccgagcaagcaaacgacttctataaggaaataagcactgcgtgcacgaacctatcatccctacataatcaaaataccctacaaatatcatgtccattctatctcatgtataactcaaattctatacatcgccgagcctggcatggcagttaccacgtgggctacctctccaccaagtccgaacgacgaccgccacggtggaacatgttgccacgccaggaccggtgacgtggcagtattctttgccatgccatatatgtggcgtggccaaaaggtttatttttgaaaataagttttggcgtggtctattattaaaattatttttaaaaaaggtctaaataataaaaaattgtcatgtaatgaaggtttgtactctaataccatgttataccctagctttaatacccgcattattctaaattttaggaaaagcaaactcctgtacattcagaattctacatacactttaatccacacgatatgtaaaatggttaacccaaaaattctatggttagaacgcatgtattttatatgttgatacctacctgttaagactccacccagacttattctaccatcaccacactatcggccaaactagggatggcaatcgggcgcgacgggcacgggtagtgcctacccatacccgtgcccgtgagattatttgtgcccgtgggtatgcctgttactacatgacggtcaaggattgttgcccatgcccatcgcccgcaggcgccttatgcctgcgggcgtgcccgtttacccgccacagcaaaatcagtggaacaaaaagtctacaagcttctaagttcgaatcgaacttaaaacatcaaatattctctgcctcggtgtggtgtctctccttaggcggcgatagaggaagggggagagaaataataagggaaataaaacggaaaccgtagaaaacaaagaaagaggcttatgtattctagtggattttactcctagcctacatgtaagttagatttcgcgggtaaatgggtaaagcgggcatgggtagtgattacccataccatgcccatttacccttcgacatagcttttgacctaataagaaacccatgggtataaaatggagaacaaacccaaccctaatagggtttttacccacgagtaaacgggcaaacgggcacaattgccatccctaggccaaacatgtgtccacaccttcacttacatcgtggaccaacgtgtggtgttgtggttcttagatgtaagatttatttaccaattgccccacgcggatcattagagataaacatattatttttttctttctaccacttattctagccttattctatcatcgctttgggcccatgaagcgaagangatgctcaactacttctctttacacttcttatttctctgtgccttccgcatgcgcttcgtatgtcatggcacttgatctctatttcttcattggaggtttgggatgaacttcgtcgttctttcccaacaaaatggaaagggttgtatcacatcaaatgtcgattggttttccgtcccaaatgagatgggaactagtcaccttaatctcttcatctctatgaaagtctttatgaaaggaatcgaggtctggcccgacccggttcacgtcattccaacaactgacgaggagcaccttagtgtacgatcacgtcgatcaaatacctatatgtcattngtcctagaactatttnggtataatgtatatctatttcgcgagcactcaacattaagtgcctatcgtactatccatataatgccattatgtccttgtttagtttgatttccatgaaatgctatatggagtaatacaaaaaaaaagagcaaatattacaagtatcgcaaatgagattatcttcaaaaaaaaaaatttgaccaaaatttcttagaaataattgtcaaaaagatattggagtgtattgcgttgttggtgtaaaaaactagacaacgatgccaatgaggatgcacttgagtataacaactttaaaaataagtgtattgatctgattgattacttagttcgtaggtgcattcttggacatgatctccnttttttttccattagacacattgattgcgtgaaacttccttacaaattttgcaaaaagtaatttaaagtaaaagagagagtatgcattgttaaaattatagttctaaacgacttcctttatgaatacggagagagtatgcattattattgtactggaggtcatgatctagccatattaaggacattgtttggcatggaataccattattaaactaaaattgtagttacattgaaaaaaagtattgtactggaggtcatgatctagccatattaaggacattgtttggcatggaataccattattaaactaaaattgtagttacattgaaaaaaagtaacaacacataaatagatatagatgatattgtccaaaacatcaaggacaaaaaaaattagtagttttccaaaaaaaaaaagtatggaaccccttgatttagccaaaaacgcacatgggcacctggtttgttcaagaacacacacatagccaagtcacatttagctagttgttgaaatgaatgaattaaacccgctaccaaattaccacaccgacatagtaaactttcaagtttttgcaatcaatgtacccacctgtaatttttttattatccagagtgtaatcactccttatttaagtaggacaaacaaatacattaaacattttttaatgtaactatattgccattagagaagtgctacacttccaaaacaaaaattcttacaaatgttttacaaacgatgatgtaagatattgtgatttaatattgattttctataactttggactaattagatcaaacagttaagaaatttgtttttaagaattttgcatgaactttttagcatgtccaacattgctcttgttgttacaaaggttaaatcttgtttgcagaggcattaataatattacgaagatactgaggttgtgttcgggagtgagtccctagcatgcaaaacgaagcatcgtttagcacatgattaattaagtattagctaaaataaattttaaaaatggattaatatgatttttaaagtaacttttatatagaaatttttttgcaaaaaaacacgctgtttagcagtttgaaaagcgtgtgcgcgaaaaacgagagagatgaattgggaaagtagagataagaactcagcctaaatagtttctttgagttattataacacatgttcaataagttaattgtatacaagttttaattggtgccaaaaactggtataacaatgacaataaaaacgtatgttatttttcactagaacaacattgtaattacatgtgttaacctatacaatgtttggtttgccatgattacgataatattagaaagctcctaacaaatataaaacttgcccattttcttatccaatgatgaaatgaactatttcattatcaaattttaaatgcaaacaaagataatcttaattcgatagaactttcacataagaaaaagtcatatgccaacttcctaatgagtttttgagtaatcccttgcgtagttccatactgtgcttttagccacattgttatcaacatattggttgaattttggggcatgcaaacttatataatgaccctcgaattacactttttgaattgtaggtatgaggtgtttgggggcatattatcaacgaaacatatcctcactaggtagacatgataattacatgattaatttacaaatgactatcataaatatatggaatctcaaaagtccacttgggacacgaaatctaaatgataacatgaaagattgttaatagagacatgttagtccaaattgtttatactttcgctactcatatattaattgaaataaatatttaaatgtgcaaataagagaacatccatgcattgcaatgaatctcaaaaggtgcacagtaattttgaagtctatttaaattctaaacaaaccacaatttaaaaatagccaaactatgtgacaagatatacaaatcattcattaaagaggtggcacactagagccaccactagtcattttatatagaagaaataaatttagattgtccaacaatacctttttttttctaaaaccttattccatcatatatttttttaagaactgaaactccgttgtaatgtagacattttaccattcaaagaaatgctaatatggttgggaattattttatacttgcattagatcatctattataaccttgatgtgagtatccataggattcgtgaattctaattaacaatactgcgaaatatgtaacacttttaacataacattcacgttataatgatgttagttaaaactttattaacatccaaaacaattttttcattggacaaataaatgctcacaaggaaatagatgttatctcaaattggtatgaagataaagaatggttgactaaggaatctattaaaataccttttttttcactgtgtaacttgttggtttgctttacactagtactttattttttgggttcttttgtatttcttatagcaatgtcattcttgtgcttatctcctttgctgtgttttaaacataaacatcatgttttgcattgatttccctgtgttgctaaatatgtgtgttttgatatttatcatgttctattatttaaatatgcatgaattgaagtatactcatatatcctatttccacaatacatactttagtttgttaccaactatgctgaattcggtgctcacattttattatcatcatgttatggtttgatacaatttgacagtttcaagctaaattgggtcaaaaaatgttcatcggaaaattcaacttgggtaaatatttcatcatattgacttcatgctctgatcttcgtggaaatagagaaggatctgctgactgatttagcttttgaacaagtgcaacttggtgcatcgacaagattttgtaggaaatttactacatggggtggccatcatactgaaaataatttatataaaaacttatgtttcatcattattatattcatgtgattgtcttatacataactatttggattcattcaaaccctactctcttttgtaaacttgtattttgcaacaatattatcattggtacttagatgaaacttggttaacaatataatcattagttcttaactttttaagttgactttttgaatatccgtccttgtattgttttagctatgttttattaatagttgtgtttgatcttttttgcggagttggtgccttattgttttgtttacatttctagatatatttgtcctaggattggtgctcttatgcatactcatgatgaggtactcgtttaatgaaaagaaataaagattgtacctcatgttccaaaacaacatattcacaattcattatcatggaagtctcatccaagaaccttttttaactggcgtttcttaaattttgcaaaaactctgactttgaattaagatggataagttcccatgatcaacatagctttcaattctatatagtagttgttattttctaaattagtcaacatctcctaatcttatacattgtactacttacattttgcatgtttatcttcatgatagttcttaaatttctatgacatgtatgtaatttacctttaggttttatgaaaaaggtcgatgacaatgatatgaaattagactaaggaccgatatttcgctgtcaagaattgacatgctaaatcatttgtgccataaaatccaaattgaaaactcacttgtgttcacattattggtcaaaacaaattatatatctatgttctaatatcatgaaaaatgtagaaaaaaagcacttcgaagcttcctatgcaaactgctctcaactagtgccttcagaatattttaaaatagcaactcctacatagcctcattcaaatcaaagtttcaatcacactattgatattactttgagctatttacatactagatgtttatatttgttatattaatagaggttcatgttggtacttctaagaaattgggtcatatttaacatgcttaacctcatcaccttcaaattatgttttagatttgttatgtaaaactagttcatatttattatactaatagagggtacatggaacaaatatgacacatatttaatggttaaaaccttctccattacggaaaccgattcaaatgtgtcatagttggtctcacaacaaaaaaaataggttatactagtcatgaaaatatacaaaatcaagttagaacataatagcgtaatctaggaattaaaagtgcataaaaggtggcttttgataatacgatggtggaggttgggcgcacatatcatgaccggtgttttatggagaaattttttattggggcttggaatatttaaaagcaaaggaatggtttcatctttgaaaatatttttccttccttggtttcttggagacaatcccttaagggtgatctccttttgttgttttgttgtttagattgagtgagggtgataaagatgtagtcttaaactggattaggttgttgtaatcatttatgtttctttttattatcaatatagttttttaacagtggggggcctcccatgttgtgttcctttaaaaaaagtgcataaaaggaatatgtcaggatattatttccatttttagtattactaggcttttgaaaacataaggaacattgaaaagaaaattgaattaagtgcatgtttaatctataaattcaaaatcgaaagagttaatacatattgtatagaagttcaacacaccaaagcaaaacatactactatgactacttgttgaacttcacaatatgctattcacaaatggtagtgagatgcaagtagcactcaaatttagctaaaataaaataaaaagaataagctacaattctagtaacataatggttcttagaagtattttcattactatttgccctacttgagtgataatcatcaaaagtatgcactttatgaaggatatgggtaaagttattgataataataactaaaacatgctatcaagatgcaccaaggactcatggtgttgaagtgtaaaataattatattcctctagtggatcaaaagtatgcactttatgaaggatatgggtaaagttattgattgagttgtttgaaatttcctttggcatatcattactctagaccttgcatgaagaatgcgtaaagtttatatttgagttgtttgccatttcctttagcgtattttgctctaaactttgtaggaaggatgggtaaagttattgtttcgagttgtttgaaatttcctttggcatatcattgcaagaccttgcatgaacaaagggtaaagtttttgttcgagtggtttgccatttcattcaccacattttgctctaaacttatgtaggaaggatatggttggagttatcatttgggttgtttgccatttccttcgatgtctcattgctctaggcttagttgatatcttggtaatttggctcatcttggacttagctatatatttattgtcattggagtcatggctctagtcatcctaggatcgtggttagtggccttgatgatcttacttggttagttgtggtacttggttagttggtaccacattccttgtagaaattcggttaaagaaacattactggagtttataattcccaaatgtaaatcattgtgaattattaattctctatatactctaacgggacaaaagaaaattattcataccaaatcatagatactatttgtacacctaaaaatataagattgtaaagaccatgtatctcatagtcaacaaatcatgttcccaatcatgtatatatgaggacatgcatctaaacttgattttaacaaattttattttaaaaacaaaaaagtaacaaaaaaaaggtgatttatattggtaacacatatatcctctaccctagaggggccactatatcttggttgctatacatttatctccctaagaccacaatattcatccatatgaggggcatccaatgaattatctcaattcctcttgactatggccttattaactgccctacttataaagtctcaatatgtcaacatacttattggcaatcatatggccaacatgttgatcaagtgtttgcgtaggagttgatccaacactagtatcatagttttgtatagaaggtgaaatctatcaccttttacatagaaaatgatcctacagtggaaacctaaaatggtgatttcttgaaatgaaatccattagtatgtttttttaatatgaaaaatcattggtctagtttgtcgttgccagaacaaaagttctgacaattttatattagttcagtgtactataggtgaaactagttcataaaaatatgcattgtcttgatttctgaattttggcaccaaaaataagtgcactaaaggatttaaggcgttctattactaatttagagctttttgtttctggaataaccataaacatgcagtttaaatcagagattcaaaagattgagcataaacacaatagagctctttgtaaatatttcattttgatcataaatctaactcttagtgaattataggagaagacggcatgaactcagcatttttattgtccccattgtttatagttccttttggtatttagccaaagccttgaagttgaatcatatcgactgcctaggaggatattttatctaactcttacctgccttgttttctttttcagcattgaaggtacctatg

SEQ ID NO: 58 - DNA, 1148 bp, Oryza sativa
  misc_feature (1)..(1148): AF141964 3'-regulatory sequence
  misc_feature (1)..(645): 3'-untranslated sequence
  misc_feature (646)..(1148): 3'-nontranscribed sequence
tgagcaggaagcacaggtgtcctgtgcataagtttggcagtgcatgcacctcccaaattaaaaagctaataaaaaaaagagaaaatggtgcatgctctgtttgctgccagtttctcccactgattgatcccaggtagagaaaagagttgccatggcctctggctctgcttgttagatcaagggggggagatggaataaaaggatggggaagtattcaggttcttgtaatgaagacctatgctgtggtgttttagcaatgtttgatatgtgtgctacctgtgtttgactggttgtgttgcttgatgtgtcatctgaccatgatactgaaagcctgataattgcactgacttgtgtatggagtttgtttcaacctattggtatgaatctgtttgattctgtaggaactgtggtttgctgtttgccagatctgattattacgcgtgatacaatctgtccttattatgtctagggacccttatgtctatgtgtgttgtttattcgaatctggcagtgaacaatctgacgaggaactgaaaataactgatagatggttacgttgctgtatctgtaagtgtgagtgagtggatgcttatacaatcttatttttaaataattataagttgtgcctgcgtcgggagtattcataatcgtaattatatcatgttggtgtaattgtgtaagatccatatagcttcttttattatgtgtaatataaagatagcagtactagtacaaactggagtacaagtgatacctgtgctgatgtttccccatgtcctgatttgttggatcaggtaaaagtgattgttgggccggggccggccgcctggtgaacgaatctgcgtatatgcgagggcctggcccataagggaggtaacaataacaacaataacaaagtagaagagctgcatccatatccctcttcctgtgcatgtgcagggtggaaaaaacaaatatgaatttgatgcacgaatgtgcgtcgcatatgattagcacagagtagaagaggggtggttttgtatggatggttgttcttgttcctgaccttggaaatggactcgatgaagagcaatgtcggcgacacactagtgcttcctccgttccacaatgttataacctcagattcgttgtactagattgtatctcat

SEQ ID NO: 59 - DNA, 18600 bp, Oryza sativa
  misc_feature (1)..(18600): AF141964 5'-regulatory sequence engineered
  misc_feature (1)..(18600): n is a, c, g, or t
  misc_feature (2377)..(2377): n is a, c, g, or t
  misc_feature (2381)..(2381): n is a, c, g, or t
  misc_feature (2730)..(2731): n is a, c, g, or t
  misc_feature (2733)..(2734): n is a, c, g, or t
  misc_feature (2737)..(2737): n is a, c, g, or t
  misc_feature (2739)..(2742): n is a, c, g, or t
  misc_feature (3144)..(3144): n is a, c, g, or t
  misc_feature (11224)..(11224): n is a, c, g, or t
  misc_feature (11558)..(11558): n is a, c, g, or t
  misc_feature (11574)..(11574): n is a, c, g, or t
  misc_feature (11930)..(11930): n is a, c, g, or t
aaaacactgattaaagggttgttgaaaggaaaacaccggcaataaaaactagcccaaattaaatttactctaaaaaaatttactcatagcacggtgataaaaatttaagaaaagacgaaaattgtctgcattagccatgcatgtatacatatcactgcaaatgttactgaaagagacgtttcaagtgcatgtgtctctttatcttattaaaataaattctaataatatccactttaggtaatcaaccaagcacggagcactaaaaaaaattatgctggtgcccagcttgtctctttttgaaacaaaatataagtattaaaaaaagtaccgtattatcaaatttggttacatgctaaacataactaaaatactttcgttaattgcatccaaccattttaaaattacttttggtaattgtagccagccatttttaaaattatctgtagttaaaatcgaagtaataaaactcaagattgccaaataaatgcaaacggtaagagtatgaaaaatcagctatgattgttggcgggaagaagtttcgggtaaaagaaaattagatgtgcatagatctggaatgagggaaatagaaaaaaaagcctaattctaatgtggatcgttaaaaatcacaaacacaaacattttttagtaactcgtttcaatatcttttaagtctttcaaatgccactgacatttacaattttaaatcaacacatatgcacatgaatgcgtccttttcatcaaactaaaggtatgatatctgtttatttgtaaatataatactacttttatgcgcacccaaatttctcataagggaaagagcagcgttactagttttagaaagggacaaaacattaacatgagagcgaatcgtttgcatggtgtgcgcaaagcatttattcctaagttggggggggggggccgggggaagttggggaaccgacctgtgcaagttgccatctgctgatgtgcaaacggagcaatttaagggtaatgctcttctctgattttagaatttgatttttcatttgacctgccatgccattcaaactatatatttctataaaacaaacttaaataaatttaattaaaaaaaattaaaacaacttataatataaaacaaaaaaaagtaaaatataacaacacaggatagtgagagacatatcctagtggtataaatctagacgtgtcaagttattatgttttgggcggaggagtatgatatacgtactccctgtgttctataataagtttatttttagcttcttttatttgtcctaaaataaatttatttttaaagtaattattgcatccgagtttatgaaagtatgaaataattatattgagagtagatgaaatagaaaaaatagttgctttggggatttgatacattttttttgggggggtattctagtaattttgattttgtattggtatgtgtggaataggtgaaaaatgaatttattttaagacggaggagtaattcgcatacttttcctttttcaagcaataataaaactgaagtacttgagaaaataattatgagagtcagaggcagtccatgaacacccagagtcccagagtgctcttagcaaattaattatttaccactataaaatttagcaatggttgccaaaagaccaacttgcgtaaacagaaaaaagtactagtatgacaccgaaatgatgccaacgttttactactgctagctaccattgctagtttaaaccgacatttgtggtggtagtgtagatgtgtgtttagctgggagaaagcatctccctacggacacccagagtgctcaataagggaaaggggaagcgttactagttttagaaaaggacaaaaacactgacatgagagggaggcttttgcgcttgcgtgcgcagagcaaaataaaggactgggaaaccgacctatcagcgggggtgtaaaagacggtttggcttgggagcccccgataaatagccccggcaacgcggcgtctgaggtgtacatccgcctcgtcaaatgggggccccccacgcgcgcccatcgatcccctcctcctcctccccaacttctccccaccaccacaccaccacacacacgcacgcacgcacgcacgcctccgttttccccaaccgacgagaggcggagagggaggggagctagggtttttcggggcggggaaggcgcggagggggagagtgcagctgaggcggatcgaggacaaggcgagccggcaggtgcggttctccaagaggagggcggggctgttcaagaaggcgttcgagctcgccctgctctgcgacgtggaggtggcgctcctcgtcttctcccccgtcggcaagctctacgagtactcctcctccaggttcgctctctgattccatccccntccntccccccgcctcctcctgttgttagtttgttagttacgatcaaaacccagccgcggccgaatcgagaccccccgccgcggcaggatctgccgattggttccgatcccatttcgttctgctatcccggatcgatcgatgattctccctgctatactgtatcgtaatgggtaagcctagtgcacgccatgtgctcgagactatctcgcagagaccgccacccaccggcgttgcgctgcatgacagccctgtgatttctgattagtaggatcttgttctcttagcctgtacagtagcagcagccagcagcttgtatctagtatatgaagctttgacaccttgtactgttggnngnngancnnnnaaccccccaccgcgggctactggcgctgcattgacatgcccctgtgaatttctgattagtaggatcttgttctcttagcctgtacagtagcagcagccagcagcttgtatctagtatatgaagctttgacaccttgtactgttccgcgcttcgtctccccgacggcgtgggccgcgttgtttttcctcccctggtgtgcttttacacgtgtttcgcatgaggagacaccagccttcgtagaggcggaggcgcgcagcaatacgcgcatcaccctgagagccaccgcagtgtacggcctacggcgagtgaggagtttatcattttctcccaacttttttttcggcatcttgttttttttttctctgagagggagtgatgaaggagtacagttgtgtgtgtttnctttaatttatttcagcgacagggacgaagtcggcttgctctgtagcgaccggcctattctcataaatagtcttttgttatggtattgagtggcatatgttaaataatattatttgatacaactgcttaaagatttttttgtaatggcttatttcttgtattttagtgtacacatcgaacaggactattcttagtgatatagtagtgggataacatatttatctaattaacctttattaatgatatactataaagaacattgataatatatttatatatgtcaagcaacttgattgaaaaacaagcacatcactcacaaagttagcccaattgtgcacaatagtccatttcataccatgatgctaaaaatcgcgcgctctgattgtttgagcgacaacccagaataattcataggtataatattttatatatatattaagtggtttaaaaaccaagattgaaaaatagacctcaataaaaaaaatgccccctaaaatcaactctcaaggagaaccgcgtttggctttggccgataatccacgaacaaatgatgaaatcacatattccatatattcgcattcacttatgaacaaatggcaacttttcttatttcttggtaatgtacgccctacacattttccaacccacatttttctagttttgcaccccctccaccaccaatatggtacaactacagctccaaaatttagctccaggagttaggtctggagtggagttgcctaaatccagttccacaactctagtttattttgtgcgagcttcacccagcttcactcccaattttaatggagctgtaattgtttggctgagctccagctccaagagaagtggagctagagctggagctgtgccaaacaggcccttagcttgtccaaatggtctagattcttatttcagattctacgagtcagaaggtgcataatcaataatcaatgaactggaagccagaagttggataacgtaagcttcagctagatactcaccaattgctttttaggatctgtagctttcttaaatagggcatttcctatctttaatactccatatgtcccaaaatataacgacttttagcctttagaatttgttccaaaatattacaacttctccaccaacattctcttctcaaccaatcacaaccctccaccattcaatttctccacctacattcatttctcaaccaatcacaatcttccaccatttaattctacttattttcttaataaccgtgaccaactctaaaactcattatatcctgtccgtcccaaaataagtttatttttcacgcatctcacgcgtaccaatatctaagaaaaaaaactagaatacattcacttcatcaaattccaatgcagttgttcctcactttatctactcctaatgtattttccccctacttttacaaactctgttgcaataattgctaaaatatgaacttattttgggataaatgggaggggctaaaaatgatcttattctgggacggatggagtagatgcttcttgtagcatatgtttttgaatttaactaccatcaagttccaccacaacatatagaagtatcttgtagtaaccgttattttgctattttgctaatgaaatagactagaggcattttagcttgccttgcacacgagtgacaagtaaactagaacggaaggagaattttattccccctcaatctgaccaaatcgatccaaagccataccagtgtatgattttccttactaaatgtgaggttgatctttcactaacaatgaataaactcctctaaattttgaactaggatgggacaatagacccaaattaacataaaactaggaaatcaatgcggcgatgtttaagtaatgaccatgattgtagacaacaaaataacacaaaattgataaaataactcgtacatgtatgtcatagattatttaatatttgttgggtcgtccccttcatgtgttaaatcatctaggaatttgtcctaacatttgggataaaaaatttcgctaataaatctattgaacatctaatgtacgacaaaagtctctatgacaacccactattagaaattggggcatatagatctccagcaaaccttaacattttattcaagggtttgtccttgaatacatccaggcaaaatgttgaggatttcaatcaaagttcgggccattggatttatttgacgcgtatcttaatggttaacatgtgccctacctcttcttaccttttcttgttatctcactattgaagttgtccatgcttactaatactcaaagcctagaggctatacacgcactacctcctgctattccatatcacattctaaccacaatgtctacggttattacttattagctatgtttgcaatgcttcgggcttgcattcaactaagatagcaaaaaaaagtgttaaagtgttaaaaaatccccacaattcccggcacacgagggggtgggggttaaaaatccccttgaatataatttgactaggtatctcttctttgttggcttagaagatttagttgtgtttagtacttcatgaagttatggctatcactacaacttggtcaagtttgatttcttatctagtttgttgccatactaattaaagtgttgcattttgaaatgcacccaaagaagtgaattatgcacacatactagaatcattaacaatcgtttttaaacttgttttatgaatactaatatgtattttatacgcacgtaagacccacataatatgctgaccatatatgtgataaattatgaatgatcttatatcttttatactcccttcgtttaaaactagagggtgtattatgattttacacaatctccaactttgaacattaatttcttttgctataaattatcaactacaaaaacaatatcatatgagagtattttttaaatttgaatctaatgatactacatgtgtagcattaacaacatatttttgtttaattatcagtcaaaattttaaaatggtgattttacagaaaacaacgatgtcatatatatattagagcggatggagtatgttacaaacaaactaactagcatcattactacaaagcttgtccaaggttgaacaaaatcatctcaaaagctctaaccatcatatcattccctcaaaaggcacaaatcattccttgctagactgcttcctatgagtaaattacatcgagcagtaatgtttatcagttatctctatgcacaacctaataatacatcatgcgagtccacaacctttttgcctcctgccaatctatagtattacataattattagaacatagcatatgccattgtttttaaaattcttcctaaatattttaacaaatcaattctaaatatgttagaacatctattataatgtttcaacaatgcacatagtttcatctggtttccttatgcctctccgtagtcggatcattgatttgtcttacgacattaacaatgtgaagtgcaaaggtgctcccagggagaaaacaagtccacataatctagcgtttatgaaagagatgtttatctagttagtaaccaataattctgatattggttttcccatgcgtgtgatggatattcattgcaacttacaggcaaataatattgtgcattttcttatttcgaaaagatatcgtacggatgaaagtacatgcatacacttttacacaatattatacaaaattaggtttgcttttcttatcttcagtcttataatataaacatgcaagcatatacaaaatattatctcaaaaatttataatcaacttatgtcaaacatgcaagcaaggatgttgacaagctttaaagtttctttttaaaaaggtcacacttatctgaaatgatcccaattatctcattagtttggatactatattactcctaaggcatgccaaatttataattaacctgacggggttaattttttacattatgattgtagatatcatgaaaacatgtgcttagattattattaacctagaaaaatatgggtttcactattttagttcatagcgtacctgtagttcacacaaaaagtaaatagtattgaggcaactttcaaagtttagatataaagagaagacatatgcaagatattttaaaatataacctttttttggccaaaaaagcactgttattctatgggatcgccaatcacacttaaccatgcaaatatgcaatttgcattgccataagatatttgcactaccatttgtcgcatatttcttacctaatttgcatctctacctttggaccacaaactcttagtctacaactgcacataccactatcaagcatgccagaaggtatgatgtgaggactatcgcaaatcacgtctatagtagaaaaaaaaatcatgccatataaggttcatggagcacatgaaggcaaccatgatatggatgatgatgatgaccattaaatcttctttagggatttggtgcgtactagtagtacgatttaggtattattagtcttgcttcatggaagtacaatttaatgtcaacatcaccatagatatgctaatcaactagagcaaggctgataatattttcaaaataattatgggcacaaatagatgacgaactcttagatgaacttaaggggattgtggaagacaacaattgtcagacgttgatgaagatccatgcatttgtttttatatgtatcttgatcattcatctatactaatataaaagatgctagcggtggaatctatcatcaccaccacccaactacgatgttagaccccgcaaacagtgagtctttccgtattccccaacccctacaagccatagaccctaagacctctagctcaattggcacaacaaaagtaacatgataataatatattagtcaatacaaataacatttttagggacttgaaaatatatacaaggagccattttttcttaaaaggcatgtgcattatgctattatgattgataagcataactgatatgccacacatgaagtatttttcatacggcctaatgatggattaatactaaccaaataaattttgtaaattatgattattaattatataattgtccttattagctatctcgcggaaattcctatgtttcaaaaaatctgcatcaccaaactcttttgagggaccaaatatgcataacatctgacttatacttttgtcatttctccatgtgaaagtgttaagtcaaaagtactataagaacatgtggatttatgtaggccgctatctatctagactctcaatgtgaaattaatcacacaaacaccagaggccatatgggtctctactaccaagctgggtatcacattcacacccagtgagctcacaccttttgtctatctgaatcaaacttttttttaccataatgtgttcttcctactatataccaagtatattgttctaatcttagatggaaaaataaatagaaaaataatctaaaaagatggatcctccaccttcattatgagtaatgaactaggtgctgatacaataaaaagagttgactagattaaccggaatagagtctagtctctagttgcctaagagcaacccatatttatccattccaaagtaaatctactgcctgagaccatctctctcccaagaacatatgcacctgaatgtccagaagaccaaaaccagcccatgctgcatggtacactattaggctatataatatccatcgtcccaaatgcacatgtttgagtagaatttttttatttagacctttttaataaataattttaataatagacctcgtcgaaacttatttccaaaaatgagccttttggctatgccgttggaactggcgtggccaaactcttttgccgcaccgttggtcccagcgtggcacctgctacctcgtagctgtcatcgtgttgattaagtgaacgccgacgtaccacttcctgtcacaccaggctcattagtgttgcagctgccaattgccacgcctggctcgatggcatggcagtgtcctctctcaattcttcctcccatcctgtgagaaagtaattttcattgggagatcgatattgttaggatgtattttcattattttgttagccattgtggtttatagatgaacatgacaagtttatagttacaaatttggcacataacgagtaaagatcagatgaagtattagcggtatttgtgaggtattgttagaaaattccacaataacgaatggtttggatggtccattttagaagtgttttgatggacttgatttatgtgttaaagatatgaatggttcaagcattgttgtttttgtctttaatacaatttagatgggtggaaatgactaaatccctcgtaagcaaccatcggttggtgtcgtaggaagagaaatttctagcacacgttgtaacaaccacatccatagaacaaacttgtgatcttgaaacgaatgcaacatacgtcgaccacttcaactcacatgatatgagcatcgccacaaagtatttccttgatccaatccctgcaaccttccattcttggcatgtccataggttcgacatgttgcactttagatcagacccgatcacatgattctacccatataggattggtcgtaaacactaacatgtctacttccataccatcaaactttctatttgcactaatggttcaaccgaaatatacacgcaccccaggatctatctacatgcataatattcacatgcaaatcaaatactcattatagaaccacgtgaccgagcaagcaaacgacttctataaggaaataagcactgcgtgcacgaacctatcatccctacataatcaaaataccctacaaatatcatgtccattctatctcatgtataactcaaattctatacatcgccgagcctggcatggcagttaccacgtgggctacctctccaccaagtccgaacgacgaccgccacggtggaacatgttgccacgccaggaccggtgacgtggcagtattctttgccatgccatatatgtggcgtggccaaaaggtttatttttgaaaataagttttggcgtggtctattattaaaattatttttaaaaaaggtctaaataataaaaaattgtcatgtaatgaaggtttgtactctaataccatgttataccctagctttaatacccgcattattctaaattttaggaaaagcaaactcctgtacattcagaattctacatacactttaatccacacgatatgtaaaatggttaacccaaaaattctatggttagaacgcatgtattttatatgttgatacctacctgttaagactccacccagacttattctaccatcaccacactatcggccaaactagggatggcaatcgggcgcgacgggcacgggtagtgcctacccatacccgtgcccgtgagattatttgtgcccgtgggtatgcctgttactacatgacggtcaaggattgttgcccatgcccatcgcccgcaggcgccttatgcctgcgggcgtgcccgtttacccgccacagcaaaatcagtggaacaaaaagtctacaagcttctaagttcgaatcgaacttaaaacatcaaatattctctgcctcggtgtggtgtctctccttaggcggcgatagaggaagggggagagaaataataagggaaataaaacggaaaccgtagaaaacaaagaaagaggcttatgtattctagtggattttactcctagcctacatgtaagttagatttcgcgggtaaatgggtaaagcgggcatgggtagtgattacccataccatgcccatttacccttcgacatagcttttgacctaataagaaaccgatgggtataaaatggagaacaaacccaaccctaatagggtttttacccacgagtaaacgggcaaacgggcacaattgccatccctaggccaaacatgtgtccacaccttcacttacatcgtggaccaacgtgtggtgttgtggttcttagatgtaagatttatttaccaattgccccacgcggatcattagagataaacatattatttttttctttctaccacttattctagccttattctatcatcgctttgggcccatgaagcgaagangatgctcaactacttctctttacacttcttatttctctgtgccttccgcatgcgcttcgtatgtcatggcacttgatctctatttcttcattggaggtttgggatgaacttcgtcgttctttcccaacaaaatggaaagggttgtatcacatcaaatgtcgattggttttccgtcccaaatgagatgggaactagtcaccttaatctcttcatctctatgaaagtctttatgaaaggaatcgaggtctggcccgacccggttcacgtcattccaacaactgacgaggagcaccttagtgtacgatcacgtcgatcaaatacctatatgtcattngtcctagaactatttnggtataatgtatatctatttcgcgagcactcaacattaagtgcctatcgtactatccatataatgccattatgtccttgtttagtttgatttccatgaaatgctatatggagtaatacaaaaaaaaagagcaaatattacaagtatcgcaaatgagattatcttcaaaaaaaaaaatttgaccaaaatttcttagaaataattgtcaaaaagatattggagtgtattgcgttgttggtgtaaaaaactagacaacgatgccaatgaggatgcacttgagtataacaactttaaaaataagtgtattgatctgattgattacttagttcgtaggtgcattcttggacatgatctccnttttttttccattagacacattgattgcgtgaaacttccttacaaattttgcaaaaagtaatttaaagtaaaagagagagtatgcattgttaaaattatagttctaaacgacttcctttatgaatacggagagagtatgcattattattgtactggaggtcatgatctagccatattaaggacattgtttggcatggaataccattattaaactaaaattgtagttacattgaaaaaaagtattgtactggaggtcatgatctagccatattaaggacattgtttggcatggaataccattattaaactaaaattgtagttacattgaaaaaaagtaacaacacataaatagatatagatgatattgtccaaaacatcaaggacaaaaaaaattagtagttttccaaaaaaaaaaagtatggaaccccttgatttagccaaaaacgcacatgggcacctggtttgttcaagaacacacacatagccaagtcacatttagctagttgttgaaatgaatgaattaaacccgctaccaaattaccacaccgacatagtaaactttcaagtttttgcaatcaatgtacccacctgtaatttttttattatccagagtgtaatcactccttatttaagtaggacaaacaaatacattaaacattttttaatgtaactatattgccattagagaagtgctacacttccaaaacaaaaattcttacaaatgttttacaaacgatgatgtaagatattgtgatttaatattgattttctataactttggactaattagatcaaacagttaagaaatttgtttttaagaattttgcatgaactttttagcatgtccaacattgctcttgttgttacaaaggttaaatcttgtttgcagaggcattaataatattacgaagatactgaggttgtgttcgggagtgagtccctagcatgcaaaacgaagcatcgtttagcacatgattaattaagtattagctaaaataaattttaaaaatggattaatatgatttttaaagtaacttttatatagaaatttttttgcaaaaaaacacgctgtttagcagtttgaaaagcgtgtgcgcgaaaaacgagagagatgaattgggaaagtagagataagaactcagcctaaatagtttctttgagttattataacacatgttcaataagttaattgtatacaagttttaattggtgccaaaaactggtataacaatgacaataaaaacgtatgttatttttcactagaacaacattgtaattacatgtgttaacctatacaatgtttggtttgccatgattacgataatattagaaagctcctaacaaatataaaacttgcccattttcttatccaatgatgaaatgaactatttcattatcaaattttaaatgcaaacaaagataatcttaattcgatagaactttcacataagaaaaagtcatatgccaacttcctaatgagtttttgagtaatcccttgcgtagttccatactgtgcttttagccacattgttatcaacatattggttgaattttggggcatgcaaacttatataatgaccctcgaattacactttttgaattgtaggtatgaggtgtttgggggcatattatcaacgaaacatatcctcactaggtagacatgataattacatgattaatttacaaatgactatcataaatatatggaatctcaaaagtccacttgggacacgaaatctaaatgataacatgaaagattgttaatagagacatgttagtccaaattgtttatactttcgctactcatatattaattgaaataaatatttaaatgtgcaaataagagaacatccatgcattgcaatgaatctcaaaaggtgcacagtaattttgaagtctatttaaattctaaacaaaccacaatttaaaaatagccaaactatgtgacaagatatacaaatcattcattaaagaggtggcacactagagccaccactagtcattttatatagaagaaataaatttagattgtccaacaatacctttttttttctaaaaccttattccatcatatatttttttaagaactgaaactccgttgtaatgtagacattttaccattcaaagaaatgctaatatggttgggaattattttatacttgcattagatcatctattataaccttgatgtgagtatccataggattcgtgaattctaattaacaatactgcgaaatatgtaacacttttaacataacattcacgttataatgatgttagttaaaactttattaacatccaaaacaattttttcattggacaaataaatgctcacaaggaaatagatgttatctcaaattggtatgaagataaagaatggttgactaaggaatctattaaaataccttttttttcactgtgtaacttgttggtttgctttacactagtactttattttttgggttcttttgtatttcttatagcaatgtcattcttgtgcttatctcctttgctgtgttttaaacataaacatcatgttttgcattgatttccctgtgttgctaaatatgtgtgttttgatatttatcatgttctattatttaaatatgcatgaattgaagtatactcatatatcctatttccacaatacatactttagtttgttaccaactatgctgaattcggtgctcacattttattatcatcatgttatggtttgatacaatttgacagtttcaagctaaattgggtcaaaaaatgttcatcggaaaattcaacttgggtaaatatttcatcatattgacttcatgctctgatcttcgtggaaatagagaaggatctgctgactgatttagcttttgaacaagtgcaacttggtgcatcgacaagattttgtaggaaatttactacatggggtggccatcatactgaaaataatttatataaaaacttatgtttcatcattattatattcatgtgattgtcttatacataactatttggattcattcaaaccctactctcttttgtaaacttgtattttgcaacaatattatcattggtacttagatgaaacttggttaacaatataatcattagttcttaactttttaagttgactttttgaatatccgtccttgtattgttttagctatgttttattaatagttgtgtttgatcttttttgcggagttggtgccttattgttttgtttacatttctagatatatttgtcctaggattggtgctcttatgcatactcatgatgaggtactcgtttaatgaaaagaaataaagattgtacctcatgttccaaaacaacatattcacaattcattatcatggaagtctcatccaagaaccttttttaactggcgtttcttaaattttgcaaaaactctgactttgaattaagatggataagttcccatgatcaacatagctttcaattctatatagtagttgttattttctaaattagtcaacatctcctaatcttatacattgtactacttacattttgcatgtttatcttcatgatagttcttaaatttctatgacatgtatgtaatttacctttaggttttatgaaaaaggtcgatgacaatgatatgaaattagactaaggaccgatatttcgctgtcaagaattgacatgctaaatcatttgtgccataaaatccaaattgaaaactcacttgtgttcacattattggtcaaaacaaattatatatctatgttctaatatcatgaaaaatgtagaaaaaaagcacttcgaagcttcctatgcaaactgctctcaactagtgccttcagaatattttaaaatagcaactcctacatagcctcattcaaatcaaagtttcaatcacactattgatattactttgagctatttacatactagatgtttatatttgttatattaatagaggttcatgttggtacttctaagaaattgggtcatatttaacatgcttaacctcatcaccttcaaattatgttttagatttgttatgtaaaactagttcatatttattatactaatagagggtacatggaacaaatatgacacatatttaatggttaaaaccttctccattacggaaaccgattcaaatgtgtcatagttggtctcacaacaaaaaaaataggttatactagtcatgaaaatatacaaaatcaagttagaacataatagcgtaatctaggaattaaaagtgcataaaaggtggcttttgataatacgatggtggaggttgggcgcacatatcatgaccggtgttttatggagaaattttttattggggcttggaatatttaaaagcaaaggaatggtttcatctttgaaaatatttttccttccttggtttcttggagacaatcccttaagggtgatctccttttgttgttttgttgtttagattgagtgagggtgataaagatgtagtcttaaactggattaggttgttgtaatcatttatgtttctttttattatcaatatagttttttaacagtggggggcctcccatgttgtgttcctttaaaaaaagtgcataaaaggaatatgtcaggatattatttccatttttagtattactaggcttttgaaaacataaggaacattgaaaagaaaattgaattaagtgcatgtttaatctataaattcaaaatcgaaagagttaatacatattgtatagaagttcaacacaccaaagcaaaacatactactatgactacttgttgaacttcacaatatgctattcacaaatggtagtgagatgcaagtagcactcaaatttagctaaaataaaataaaaagaataagctacaattctagtaacataatggttcttagaagtattttcattactatttgccctacttgagtgataatcatcaaaagtatgcactttatgaaggatatgggtaaagttattgataataataactaaaacatgctatcaagatgcaccaaggactcatggtgttgaagtgtaaaataattatattcctctagtggatcaaaagtatgcactttatgaaggatatgggtaaagttattgattgagttgtttgaaatttcctttggcatatcattactctagaccttgcatgaagaatgcgtaaagtttatatttgagttgtttgccatttcctttagcgtattttgctctaaactttgtaggaaggatgggtaaagttattgtttcgagttgtttgaaatttcctttggcatatcattgcaagaccttgcatgaacaaagggtaaagtttttgttcgagtggtttgccatttcattcaccacattttgctctaaacttatgtaggaaggatatggttggagttatcatttgggttgtttgccatttccttcgatgtctcattgctctaggcttagttgatatcttggtaatttggctcatcttggacttagctatatatttattgtcattggagtcatggctctagtcatcctaggatcgtggttagtggccttgatgatcttacttggttagttgtggtacttggttagttggtaccacattccttgtagaaattcggttaaagaaacattactggagtttataattcccaaatgtaaatcattgtgaattattaattctctatatactctaacgggacaaaagaaaattattcataccaaatcatagatactatttgtacacctaaaaatataagattgtaaagaccatgtatctcatagtcaacaaatcatgttcccaatcatgtatatatgaggacatgcatctaaacttgattttaacaaattttattttaaaaacaaaaaagtaacaaaaaaaaggtgatttatattggtaacacatatatcctctaccctagaggggccactatatcttggttgctatacatttatctccctaagaccacaatattcatccatatgaggggcatccaatgaattatctcaattcctcttgactatggccttattaactgccctacttataaagtctcaatatgtcaacatacttattggcaatcatatggccaacatgttgatcaagtgtttgcgtaggagttgatccaacactagtatcatagttttgtatagaaggtgaaatctatcaccttttacatagaaaatgatcctacagtggaaacctaaaatggtgatttcttgaaatgaaatccattagtatgtttttttaatatgaaaaatcattggtctagtttgtcgttgccagaacaaaagttctgacaattttatattagttcagtgtactataggtgaaactagttcataaaaatatgcattgtcttgatttctgaattttggcaccaaaaataagtgcactaaaggatttaaggcgttctattactaatttagagctttttgtttctggaataaccataaacatgcagtttaaatcagagattcaaaagattgagcataaacacaatagagctctttgtaaatatttcattttgatcataaatctaactcttagtgaattataggagaagacggcatgaactcagcatttttattgtccccattgtttatagttccttttggtatttagccaaagccttgaagttgaatcatatcgactgcctaggaggatattttatctaactcttacctgccttgttttctttttcagcattgaaggccaccatgg

SEQ ID NO: 60 - DNA, 1143 bp, Oryza sativa
  misc_feature (1)..(1143): AF141964 3'-regulatory sequence engineered
  misc_feature (1)..(640): 3'-untranslated sequence
  misc_feature (641)..(1143): 3'-nontranscribed sequence
aggaagcacaggtgtcctgtgcataagtttggcagtgcatgcacctcccaaattaaaaagctaataaaaaaaagagaaaatggtgcatgctctgtttgctgccagtttctcccactgattgatcccaggtagagaaaagagttgccttggcctctggctctgcttgttagatcaagggggggagatggaataaaaggatggggaagtattcaggttcttgtaatgaagacctatgctgtggtgttttagcaatgtttgatatgtgtgctacctgtgtttgactggttgtgttgcttgatgtgtcatctgaccatgatactgaaagcctgataattgcactgacttgtgtatggagtttgtttcaacctattggtatgaatctgtttgattctgtaggaactgtggtttgctgtttgccagatctgattattacgcgtgatacaatctgtccttattatgtctagggacccttatgtctatgtgtgttgtttattcgaatctggcagtgaacaatctgacgaggaactgaaaataactgatagatggttacgttgctgtatctgtaagtgtgagtgagtggatgcttatacaatcttatttttaaataattataagttgtgcctgcgtcgggagtattcataatcgtaattatatcatgttggtgtaattgtgtaagatccatatagcttcttttattatgtgtaatataaagatagcagtactagtacaaactggagtacaagtgatacctgtgctgatgtttccccatgtcctgatttgttggatcaggtaaaagtgattgttgggccggggccggccgcctggtgaacgaatctgcgtatatgcgagggcctggcccataagggaggtaacaataacaacaataacaaagtagaagagctgcatccatatccctcttcctgtgcatgtgcagggtggaaaaaacaaatatgaatttgatgcacgaatgtgcgtcgcatatgattagcacagagtagaagaggggtggttttgtatggatggttgttcttgttcctgaccttggaaatggactcgatgaagagcaatgtcggcgacacactagtgcttcctccgttccacaatgttataacctcagattcgttgtactagattgtatctcat

SEQ ID NO: 61 - DNA, 8992 bp, Oryza sativa
  misc_feature (1)..(8992): AF141965 5'-regulatory sequence
  misc_feature (1)..(2017): 5'-nontranscribed sequence
  misc_feature (2018)..(2322): Exon
  misc_feature (2323)..(8976): Intron
  misc_feature (8977)..(8992): Exon
tgtttctcgattaggctacaagttaacatcagatttatgggttcaaatatagtactagtttacatcgcatttaacagtagaattatttctcaaaacaaaattgtagtatctgatttttggtaatgagtttgtagcatggaatgatgctgtgttctgatttgcacaagaatggcatgcgtactatgcatgtcaagggctcaattgtgatgatttgtaccccttttttttgtgaaattcagatagattgctacatgctttcctcttttggtttctgcatataatcctggtttcttctagaggagttctaatttggttgtcccatgttgtaaataaaattatgattgtaagtacaaatggctataaaattgatacggcattcacaatattatattgagatatttctttttatataagattagcacacaacttttcattcgagtactgctctcattgagatggccagatactattttctgattgaaaagtccacgcccatgcatatggttttaattaaaaggcacatgtgttttcgtgagaatgtgaaatcaaagcatgtcgctattgccatgattatcctaagatttcacgctcttgcccgcaaaaactttaacgggctactcacagggaaaatagttggcagatagccacgctttaacgtacgattgccatatatatgaaaaacaaaacaagccatacgcctagccacttgcttttgacatatcccactctggtgtctggacaaggatagaaacaaaccccaccaccattcatgggccgtttgatttatttatttctagcaatggtagattcttttattgggtcggaaaacggatgtgagccactcttgtggtacatgttaacacaactttaactagttcattttagtgatgagattagggatttttcgctggtctccgtctcttcgagtatgtgttaggggcacatccacggttaaatcgagaggttcactccatagaatcaataatatgtacattaggacatactccctccgtcctgcaataaatgaatctagctaggactgaatgtggatgtgacacgttctacatccaagactagctggattggtttttaatgggcgaaggaagtaataagaaccaaaatggttaaagcttgaccatcaatctaagcataagagcaagtataatagtaggctataagccggctaaatgctgaggtggatgagagaagcgggctgtagacttacagccggcttgagcataagaaccaagaaactctgtgagagagacaaatgggtcctatattaattgtaaagagctaactattatataggtaggctgagagaaagctacaaagaaccttatagccaataggtcggctgtattattagccttgctctaatgcagttgccagaaatgtcctaggcgggaatacctggggtgcaaatgggtgaattctttcccaccaattggcgcggtccctctgatctctctttccccataggcggaggccagctaagcggaaaggggccacctggtggtagtgttggggcggggcctcgcccacttgttcctacgcccctttccgcgcgaggaggtgggacgagagacgacggcgatccacggccaatggcgattgccggtctcggtcggtcgcactcgcgctcgcgcgcgggcgcctcgtgggtcgcgggtttcccaggacgggaagtcgctcgcgcggtcgccttctttatttggctacctcctcctcctctcccctccccacccatctcgccctcgtctcgtctcgtctctccactcccccacctcccatccgctactgctagtactactactacccggcctctcgccttctcgcgcggccgcgatttccgttcgcaaatccgcacccacggcggcgcgaggtcgccgtcgtcgtcgagccatttcgggtgagagggggggtctccggtttttctcagatctgtccacttttgtccagttttgatctggtgatttaatatactatttttcacttctggtggtttgcggcgacgcgtgtgcaggggggtagtttataagggcttgcgcgaggagggggaggagtagcgggtagcggcggctcgagtcgagtcgtcgtcgtcgtcggcggcggcggtcgagagagatcgggatcgatggtgcgggggaggacggagctgaagcggattgagaacccgacgagccggcaggtgaccttctccaagcgccggaatggcctcctcaagaaggcgttcgagctctccgtcctctgcgacgccgaggtcgccctcatcgtcttctccccccgcggccgcctctacgagttcgccagcgcccccaggtataccttcttctcgttctcggcaagttctcgccggaaattattctctcgctcgtttcgccctcgtcgtgctgctgcatcaaatgcaaatgcgatttcattctctctctctctctctgtggtaatcgggtgatttttgtggtttggggggtttgaggattcggctgttgggattgcttgttcgtcagagtttgaattcctgcccttaattccgtcgaacaaaaatgggttctctgttcggatttggcacctgcggatttggccaccgctgctgcgacgacgaagacgacggcgacggcgaccgccggccacacacactactagtagcctactagttcgtcttgcttctcacttgctattattgttattattggaagctgtgaactcctgtagaagttgaccccttctctccccctaaatatctgtacggccctggagaccggatggatatgcccacacctcagcactctctcacagtcaccaccagttgcctgtagtatctcttcttcattcatcttcttcttcctctcacatgttaacaactgttccatggagcatgtccacgagctctggattgattctctggcgcgtctctgtgcatcttccttccccattcgtcgattcttgttctcgatccgcgggaaaattgacgattaaaggaggctcctgacctctgaataaaatcaaggacaaaaacgtacaagaaggcagaggtaataaacccaagatagccaatatacaaagaaaaaccaaagtaaatggcagccaatgggaggaaggaggccggccggcgtgcgtggccagtaattgcggggtaggaagaaggctgcgagcctgcgagcgtgcgagactacaaatggagaaacaagctaatgtgacatccggtcagtgagatgagagatcattgggcgcctacctgcaccctctctctctctctctcgatccacaccactgcactgctcccctctcgatcgtacactggctgatgagctagccaagttgatttctctcgcaaaacgtaccacggattggtcgcatcagctccgttcgtcgagggtatggtgtgggggtatctttccatcatacacagtatgacgttggccacagtacatagcatgcgatatggctgtttctgaatattttttcagttttcagcaggtccgaatttgttaggtggaaccgtgatttatatatttctcccctcttccttgtggatatagtactcgtattgtgtatcttactcctagttctcttgcacccactccagctggagagtggagagagtggagagtacgtaccttatctggcgcacactgtactataatccttatattttggtgatcaggtgcaccgtttattatagattaatcatcatctcttagacatggcttgttgcaccttaatatccatctctttatcaggcttatatgtctacggcagtgaaaaagcgttgccagttaattcattgtcgtgcatgtagtttccaaaccatagtctagggaacactcaatgttgttccatgatattaagtgatgttaagtactccataacttaattagtactccatgccaatactcgacaacataatatttccatcacacttcatatatatgtatgctctccctctttctcaattaggaagatctatctagaaaattcttgagtttgcaagctatgatatgcaacgaactttcttctaatgtaagtgcaaaactatggattgtcattcattacttacgttacttcttaataaacattatcaagaagctagattgtagagcatgtaaagctgagtggaaaaggagttttggtaagcatgtgattgacatgtcttataggtcgtcgattgatctgcccaaacaacagtacaaatgaagttaattctactgtgaatagcatgtgataactcgcaatccgtagaatgctttggctttaaaacaataattttaagagtgtgagcaatgcttatgttacttcatcagattatcgtgtgccttaattcttatctgttgatcatatttagtactcctcctacccataaatatatgaacacttgaagcatttaaaatttatccacaaatatgatgattattcctagagtactactgatccctcttcccaaaataagtgaccaatttggatgtaaaatttgtttcaagataagtgatcacattacagtgctacttgtctattaatcacctcttgttcaaacttcttatcttacctcaactaccctcccacttctaaacatccctcatttaggtcatttgcctttcctcattatttggctcatatataagtgataaagtagcttattcatttattttagaacagatcgatggagtacttattacaacaatcacccgtcattcaaatttctttctaacttacactcaaccaccgtcccacctccatctctctatcttctcctccaactctctctcttttaatgaggggcaccaaaatattttcttctcaactttaatctctactaaacaatttggcatgtgtatatttgttaatggagggagtattttctaagttctaagtacttgatatatatcgtttaaccagaaatctatacctatgtgaaaaaaatacattgtccatagatcgatctttcatgagtatattactgaatcatgccaaatttggccaatgttacatattaattatgatcttaaagtttgttctgaaattactttgccttgaatcttccaagcaagtatatatatacgtgtaggcaccacacttctcatggtcaaatttagatatttatcaacctaattagtcagtccatatatagagagttaatgcaactagctagttgctttgtctaatgtgagatcttttgtacgtgaactgtaaacattatatatacaacctccatcctatattacttgtcgctttgagtttttatttgtaatgtttgatcattcgtcttattcaaaaattttttacaattgttatttattttatttgtgatttgctttattatcaaaagtattttaaatatgacttatcttttttatatttgcactaatttttcaaataaaacaaagggtcaaacgttgtaacgaaaaagtcaaagcgacatctattatgagacggaggtagtatgatcggtgtgctgtctttagtcctgtttaagatacttaatttctctgaaatacaattgctcataattacagtgttgttgtcagttttgtcttcttttccaaatactttatttgaaatatggataaatcaaacttaccttttaccctaataaactacactatacatactaatcttaataacatttatgcataacatttatggtttttgttcattcttttcaaatccgttccattctgggcagaatggggcaatgcaagtactgtcacaaagaacaaagaacagatggtgcagccggatatgcatatatatataccagctgaatttttggccgtttcaggaaaacttcaatttaaaatcaatgttggtactatcaaattaatagctgcaaagtctccactaggtctagcaagaaagtagcagctcaatggtagtaataacttcatatgtttatcgaacagatattagctttctttaaaagtccattaccaaacaaggcttatctaggggcatagtacccccatagacccatatgtaggagtaacaaagagaaaatgattaattacaaatattttaatgggcttgtttggcagggctccaactctaagtactagctaaattctgttctacctctctagttcattttataaaagcactctagcattctcctctctctttgtaggtggagctgaaaccgtttggttgggctctagctcaaggagaggtggagttggagctttgccgtatgggcccaatgtatataaaaaatatctataatttggttatagagtatttgtatttcaatgggaaaaaggtatatgtgttaatagtattatactcttctcataaaaatgagtgtgaaactaacttttgtaataatccttactattagttagctgagctcgaactattctttagtgtacaggcaacacgccccaattctacaagtgctgcaaccaaagctttcaatactggttttgccggaaatacccgtaccgcttgctggttgttacttcttccgtttcataatgtaagtcattctaacattgcccacattcatacaaatgttaatgaatctagacataaacatatgactagattcattaacatctatatgaatgtgggcaatgctagaatgacttacgttatgaaatggagggagtattagacaaatgttcaaatctaaaattttgaactcactgtggttcagtaacctgcaggcagagaaaaacagcatgattgaaagcacagttttgcataaacaatacatcgcaagtagatgaaaactattaaaacataatcatcaataatgatctgaccagtctaaaaaaatcaataatgatacgcatcaatagatataagtccatcatgaacaatcataatgcaataatccatcacaaaacccctacatagggcataccacaatattattccttctcaaattgtaattcaaggtataacacaatttcacagcacacataaatatcttattgatcttttctctctttccattagagatgtacctacagataacccttcaaagtgaagataaattcatatataaattttcaaatatgtttttctagattttcaaattataaaataaactgtcccaggcagttactagacgttgagatttctaacatggttgtgccatcaatggctgtttaatttctgtacatattacataacatatagtagggttgtcaatgagctgaacttgagcacatggcacatcaatttcgttttcaagttgaatgaatgatctaaattgaccttgagtgaacctgagttggtgccaacaaccgatgttgaaggtatgctcttgctaaaatttaattgaaaacttgagctttagcccgataaggtcacacgaactctatttatgcatgtctgaatgtgtttcatgcaaaaaagaaaaggcatggccaataatttcgaatccataaggcttgttagcttacatgtgttatccttcaatgaaaattatattctatattggacaaggtttcgattcttgttggtttatatggttgaaacttttatgcttggaacaattcctacctgatgaatcttgttattattcccaaagaatagccaaatacaatatatttgtttctactatataacaactacattttggcaagtcaataatttttttttgcgaggaggctagtcaataattaagtaggcacactcctatgcacgccaatcagattatgttgattcagaaacatgcatgcgcactgcacataagattgctcattgaggtagttgcattatttatttagctaagatattgccagcatggcaatgaagcagatatgatgaaaatggaggatccagaatatatatcctcagcttttttttccaattatcaaaaagtttaaaccatcactaggaagagtgaagctcttgcattgttcatttaattaggtggacaacagaaggaacagttcagtttcataatatatagcggtcaagaaaaagtttcatattatatataatacatgtgattttgcgacttgatacatttatcgtagtatccattattcttgttaaactgagcctgccctgcctatggaatgattacctgaaatattattttagtggaactcagttatgccttttatattttattaaaaagatagaatttgagtttgtgtcccaattttttgttaccaggaaagattctaaaaaaactcaaaagatgttgactatctaatctttttgaacaagatagatacttagaaccaaatttacacaaagaataaagcattttaaaatgtaatacaagtagatgtatttcctagtctggtttgaactgcatacaaaaacaaaattgctccaaaggatgtctgtcatactggcaaatgtagacatgcttcttgaaaaagttggctcaaagatggtcaattatgcaatgtttttttttcaaataaatatatattttttaacatatgtactgaaattgaacgttttgtgatatacacagaacatgcaccagtttaacttgcagtcctgaattttattgatgtttaagtgcttgcgttcacttattggtaactatagaacgtccatgcatgtgctatcgtgtgtacagcttgggatgtaacatctgaattatgatataataaatatctaggaaggtaacaaaatgttcctcgctagtgctggtgttgatatattttcagagaaagctggaagcgcaactgtcaaatcaacagccgcctattggcattgaaacatacatatctacctctcgttgtttctacttttttttggcaagaatttggttggatatagttggccataggcctgtagccaccactgtttgtagcatcgcaatatgcacagacaaacatttgagctgctgagctagcagagctagctagtttattgtagcaggttggaacaagcacagctagctcaagtcatgcatgcactaataaattagagtatgtatgttttttgccccagaacgattatatcatcgatcttctgatttttagtttgctccttgtgtctgttctgcagcctacagaaaaccatc

SEQ ID NO: 62 - DNA, 822 bp, Oryza sativa
  misc_feature (1)..(822): AF141965 5'-regulatory sequence
  misc_feature (1)..(822): AF141965 3'-regulatory sequence
  misc_feature (1)..(311): 3'-untranslated sequence
  misc_feature (312)..(822): 3'-nontranscribed sequence
tgaagaaggccagccacagcaacagctgctatatagcatgcagtagcagcaacgacgccagtgacatcctgttcatctcacaagaataaccagagctctacgcatgcgcacatgaaacccaggcatgcagttctcggtgggtaaattattatctcgcattattagctatatgcgtgtccttgtctttttctttaggcaatggaataaaatttccggtaagtacaaacacaaacggaaacaaagaattaacaaagctgtagcagaccagatcggcaaattgaaatgccaggtaatccagtatatatttcgcttccagctgcctctaccctcatatctcacctgcctgtgtgtttgtgtaaattgagcttgcgaaagaggaaggtagatgctgttaatttatgggagtggaagctaaatgttgtactactggagtactgatttgtagctgatccaactgccacgagttttgggcgtcgaaattcctagacttcttgacaccgatggatggaaattatgccgacctggcgacatgatccttaagtggtgtttgaatctcgattaagataaagattaagtgtttcacgcaaaacgacaaaacgaggtggtaataacatgtgattatttgagttttaattattacaaacttgaaaaatgaattaatctgatattttagagcaattttcatatagaaaatttttgcacgaaacacatcgtttagcaatttgaaaagcgtgccacgagtatccaaaatttcattcaactcttgtcagagaaacgaacccaacctaatttcggccatcgagatttgaatattcgataagg

SEQ ID NO: 63 - DNA, 8993 bp, Oryza sativa
  misc_feature (1)..(8993): AF141965 5'-regulatory sequence engineered
tgtttctcgattaggctacaagttaacatcagatttatgggttcaaatatagtactagtttacatcgcatttaacagtagaattatttctcaaaacaaaattgtagtatctgatttttggtaatgagtttgtagcatggaatgatgctgtgttctgatttgcacaagaatggcatgcgtactatgcatgtcaagggctcaattgtgatgatttgtaccccttttttttgtgaaattcagatagattgctacatgctttcctcttttggtttctgcatataatcctggtttcttctagaggagttctaatttggttgtcccatgttgtaaataaaattatgattgtaagtacaaatggctataaaattgatacggcattcacaatattatattgagatatttctttttatataagattagcacacaacttttcattcgagtactgctctcattgagatggccagatactattttctgattgaaaagtccacgcccatgcatatggttttaattaaaaggcacatgtgttttcgtgagaatgtgaaatcaaagcatgtcgctattgccatgattatcctaagatttcacgctcttgcccgcaaaaactttaacgggctactcacagggaaaatagttggcagatagccacgctttaacgtacgattgccatatatatgaaaaacaaaacaagccatacgcctagccacttgcttttgacatatcccactctggtgtctggacaaggatagaaacaaaccccaccaccattcatgggccgtttgatttatttatttctagcaatggtagattcttttattgggtcggaaaacggatgtgagccactcttgtggtacatgttaacacaactttaactagttcattttagtgatgagattagggatttttcgctggtctccgtctcttcgagtatgtgttaggggcacatccacggttaaatcgagaggttcactccatagaatcaataatatgtacattaggacatactccctccgtcctgcaataaatgaatctagctaggactgaatgtggatgtgacacgttctacatccaagactagctggattggtttttaatgggcgaaggaagtaataagaaccaaaatggttaaagcttgaccatcaatctaagcataagagcaagtataatagtaggctataagccggctaaatgctgaggtggatgagagaagcgggctgtagacttacagccggcttgagcataagaaccaagaaactctgtgagagagacaaatgggtcctatattaattgtaaagagctaactattatataggtaggctgagagaaagctacaaagaaccttatagccaataggtcggctgtattattagccttgctctaatgcagttgccagaaatgtcctaggcgggaatacctggggtgcaaatgggtgaattctttcccaccaattggcgcggtccctctgatctctctttccccataggcggaggccagctaagcggaaaggggccacctggtggtagtgttggggcggggcctcgcccacttgttcctacgcccctttccgcgcgaggaggtgggacgagagacgacggcgatccacggccaatggcgattgccggtctcggtcggtcgcactcgcgctcgcgcgcgggcgcctcgtgggtcgcgggtttcccaggacgggaagtcgctcgcgcggtcgccttctttatttggctacctcctcctcctctcccctccccacccatctcgccctcgtctcgtctcgtctctccactcccccacctcccatccgctactgctagtactactactacccggcctctcgccttctcgcgcgcccgcgatttccgttcgcaaatccgcacccacggcggcgcgaggtcgccgtcgtcgtcgagccatttcgggtgagagggggggtctccggtttttctcagatctgtccacttttgtccagttttgatctggtgatttaatatactatttttcacttctggtggtttgcggcgacgcgtgtgcaggggggtagtttataagggcttgcgcgaggagggggaggagtagcgggtagcggcggctcgagtcgagtcgtcgtcgtcgtcggcggcggcggtcgagagagatcgggatcgatcgtgcgggggaggacggagctgaagcggattgagaacccgacgagccggcaggtgaccttctccaagcgccggaaaggcctcctcaagaaggcgttcgagctctccgtcctctgcgacgccgaggtcgccctcatcgtcttctccccccgcggcggcctctacgagttcgccagcgcccccaggtataccttcttctcgttctcggcaagttctcgccggaaattattctctcgctcgtttcgccctcgtcgtgctgctgcatcaaatgcaaatgcgatttcattctctctctctctctctgtggtaatcgggtgatttttgtggtttggggggtttgaggattcggctgttgggattgcttgttcgtcagagtttgaattcctgcccttaattccgtcgaacaaaaatgggttctctgttcggatttggcacctgcggatttggccaccgctgctgcgacgacgaagacgacggcgacggcgaccgccggccacacacactactagtagcctactagttcgtcttgcttctcacttgctattattgttattattggaagctgtgaactcctgtagaagttgaccccttctctccccctaaatatctgtacggccctggagaccggatggatatgcccacacctcagcactctctcacagtcaccaccagttgcctgtagtatctcttcttcattcatcttcttcttcctctcacatgttaacaactgttccaaggagcatgtccacgagctctggattgattctctggcgcgtctctgtgcatcttccttccccattcgtcgattcttgttctcgatccgcgggaaaattgacgattaaaggaggctcctgacctctgaataaaatcaaggacaaaaacgtacaagaaggcagaggtaataaacccaagatagccaatatacaaagaaaaaccaaagtaaatggcagccaatgggaggaaggaggccggccggcgtgcgtggccagtaattgcggggtaggaagaaggctgcgagcctgcgagcgtgcgagactacaaatggagaaacaagctaatgtgacatccggtcagtgagatgagagatcattgggcgcctacctgcaccctctctctctctctctcgatccacaccactgcactgctcccctctcgatcgtacactggctgatgagctagccaagttgatttctctcgcaaaacgtaccacggattggtcgcatcagctccgttcgtcgagggtatggtgtgggggtatctttccatcatacacagtatgacgttggccacagtacatagcatgcgatatggctgtttctgaatattttttcagttttcagcaggtccgaatttgttaggtggaaccgtgatttatatatttctcccctcttccttgtggatatagtactcgtattgtgtatcttactcctagttctcttgcacccactccagctggagagtggagagagtggagagtacgtaccttatctggcgcacactgtactataatccttatattttggtgatcaggtgcaccgtttattatagattaatcatcatctcttagacatggcttgttgcaccttaatatccatctctttatcaggcttatatgtctacggcagtgaaaaagcgttgccagttaattcattgtcgtgcatgtagtttccaaaccatagtctagggaacactcaatgttgttccatgatattaagtgatgttaagtactccataacttaattagtactccatgccaatactcgacaacataatatttccatcacacttcatatatatgtatgctctccctctttctcaattaggaagatctatctagaaaattcttgagtttgcaagctatgatatgcaacgaactttcttctaatgtaagtgcaaaactatggattgtcattcattacttacgttacttcttaataaacattatcaagaagctagattgtagagcatgtaaagctgagtggaaaaggagttttggtaagcatgtgattgacatgtcttataggtcgtcgattgatctgcccaaacaacagtacaaatgaagttaattctactgtgaatagcatgtgataactcgcaatccgtagaatgctttggctttaaaacaataattttaagagtgtgagcaatgcttatgttacttcatcagattatcgtgtgccttaattcttatctgttgatcatatttagtactcctcctacccataaatatatgaacacttgaagcatttaaaatttatccacaaatatgatgattattcctagagtactactgatccctcttcccaaaataagtgaccaatttggatgtaaaatttgtttcaagataagtgatcacattacagtgctacttgtctattaatcacctcttgttcaaacttcttatcttacctcaactaccctcccacttctaaacatccctcatttaggtcatttgcctttcctcattatttggctcatatataagtgataaagtagcttattcatttattttagaacagatcgatggagtacttattacaacaatcacccgtcattcaaatttctttctaacttacactcaaccaccgtcccacctccatctctctatcttctcctccaactctctctcttttaatgaggggcaccaaaatattttcttctcaactttaatctctactaaacaatttggcatgtgtatatttgttaatggagggagtattttctaagttctaagtacttgatatatatcgtttaaccagaaatctatacctatgtgaaaaaaatacattgtccatagatcgatctttcatgagtatattactgaatcatgccaaatttggccaatgttacatattaattatgatcttaaagtttgttctgaaattactttgccttgaatcttccaagcaagtatatatatacgtgtaggcaccacacttctcatggtcaaatttagatatttatcaacctaattagtcagtccatatatagagagttaatgcaactagctagttgctttgtctaatgtgagatcttttgtacgtgaactgtaaacattatatatacaacctccatcctatattacttgtcgctttgagtttttatttgtaatgtttgatcattcgtcttattcaaaaattttttacaattgttatttattttatttgtgatttgctttattatcaaaagtattttaaatatgacttatcttttttatatttgcactaatttttcaaataaaacaaagggtcaaacgttgtaacgaaaaagtcaaagcgacatctattatgagacggaggtagtatgatcggtgtgctgtctttagtcctgtttaagatacttaatttctctgaaatacaattgctcataattacagtgttgttgtcagttttgtcttcttttccaaatactttatttgaaatatggataaatcaaacttaccttttaccctaataaactacactatacatactaatcttaataacatttatgcataacatttatggtttttgttcattcttttcaaatccgttccattctgggcagaatggggcaatgcaagtactgtcacaaagaacaaagaacagatggtgcagccggatatgcatatatatataccagctgaatttttggccgtttcaggaaaacttcaatttaaaatcaatgttggtactatcaaattaatagctgcaaagtctccactaggtctagcaagaaagtagcagctcaatggtagtaataacttcatatgtttatcgaacagatattagctttctttaaaagtccattaccaaacaaggcttatctaggggcatagtacccccatagacccatatgtaggagtaacaaagagaaaatgattaattacaaatattttaatgggcttgtttggcagggctccaactctaagtactagctaaattctgttctacctctctagttcattttataaaagcactctagcattctcctctctctttgtaggtggagctgaaaccgtttggttgggctctagctcaaggagaggtggagttggagctttgccgtatgggcccaatgtatataaaaaatatctataatttggttatagagtatttgtatttcaatgggaaaaaggtatatgtgttaatagtattatactcttctcataaaaatgagtgtgaaactaacttttgtaataatccttactattagttagctgagctcgaactattctttagtgtacaggcaacacgccccaattctacaagtgctgcaaccaaagctttcaatactggttttgccggaaatacccgtaccgcttgctggttgttacttcttccgtttcataatgtaagtcattctaacattgcccacattcatacaaatgttaatgaatctagacataaacatatgactagattcattaacatctatatgaatgtgggcaatgctagaatgacttacgttatgaaatggagggagtattagacaaatgttcaaatctaaaattttgaactcactgtggttcagtaacctgcaggcagagaaaaacagcatgattgaaagcacagttttgcataaacaatacatcgcaagtagatgaaaactattaaaacataatcatcaataatgatctgaccagtctaaaaaaatcaataatgatacgcatcaatagatataagtccatcatgaacaatcataatgcaataatccatcacaaaacccctacatagggcataccacaatattattccttctcaaattgtaattcaaggtataacacaatttcacagcacacataaatatcttattgatcttttctctctttccattagagatgtacctacagataacccttcaaagtgaagataaattcatatataaattttcaaatatgtttttctagattttcaaattataaaataaactgtcccaggcagttactagacgttgagatttctaacatggttgtgccatcaatggctgtttaatttctgtacatattacataacatatagtagggttgtcaatgagctgaacttgagcacatggcacatcaatttcgttttcaagttgaatgaatgatctaaattgaccttgagtgaacctgagttggtgccaacaaccgatgttgaaggtatgctcttgctaaaatttaattgaaaacttgagctttagcccgataaggtcacacgaactctatttatgcatgtctgaatgtgtttcatgcaaaaaagaaaaggcatggccaataatttcgaatccataaggcttgttagcttacatgtgttatccttcaatgaaaattatattctatattggacaaggtttcgattcttgttggtttatatggttgaaacttttatgcttggaacaattcctacctgatgaatcttgttattattcccaaagaatagccaaatacaatatatttgtttctactatataacaactacattttggcaagtcaataatttttttttgcgaggaggctagtcaataattaagtaggcacactcctatgcacgccaatcagattatgttgattcagaaacatgcatgcgcactgcacataagattgctcattgaggtagttgcattatttatttagctaagatattgccagcatggcaatgaagcagatatgatgaaaatggaggatgcagaatatatatcctcagcttttttttccaattatcaaaaagtttaaaccatcactaggaagagtgaagctcttgcattgttcatttaattaggtggacaacagaaggaacagttcagtttcataatatatagcggtcaagaaaaagtttcatattatatataatacatgtgattttgcgacttgatacatttatcgtagtatccattattcttgttaaactgagcctgccctgcctatggaatgattacctgaaatattattttagtggaactcagttatgccttttatattttattaaaaagatagaatttgagtttgtgtcccaattttttgttaccaggaaagattctaaaaaaactcaaaagatgttgactatctaatctttttgaacaagatagatacttagaaccaaatttacacaaagaataaagcattttaaaatgtaatacaagtagatgtatttcctagtctggtttgaactgcatacaaaaacaaaattgctccaaaggatgtctgtcatactggcaaatgtagacatgcttcttgaaaaagttggctcaaagatggtcaattatgcaatgtttttttttcaaataaatatatattttttaacatatgtactgaaattgaacgttttgtgatatacacagaacatgcaccagtttaacttgcagtcctgaattttattgatgtttaagtgcttgcgttcacttattggtaactatagaacgtccatgcatgtgctatcgtgtgtacagcttgggatgtaacatctgaattatgatataataaatatctaggaaggtaacaaaatgttcctcgctagtgctggtgttgatatattttcagagaaagctggaagcgcaactgtcaaatcaacagccgcctattggcattgaaacatacatatctacctctcgttgtttctacttttttttggcaagaatttggttggatatagttggccataggcctgtagccaccactgtttgtagcatcgcaatatgcacagacaaacatttgagctgctgagctagcagagctagctagtttattgtagcaggttggaacaagcacagctagctcaagtcatgcatgcactaataaattagagtatgtatgttttttgccccagaacgattatatcatcgatcttctgatttttagtttgctccttgtgtctgttctgcagcctacagaccaccatgg

SEQ ID NO: 64 - DNA, 819 bp, Oryza sativa
  misc_feature (1)..(819): AF141965 3'-regulatory sequence engineered
  misc_feature (1)..(308): 3'-untranslated sequence
  misc_feature (309)..(819): 3'-nontranslated sequence
agaaggccagccacagcaacagctgctatatagcatgcagtagcagcaacgacgccagtgacatcctgttcatctcacaagaataaccagagctctacgcatgcgcacatgaaacccaggcatgcagttctcggtgggtaaattattatctcgcattattagctatatgcgtgtccttgtctttttctttaggcaatggaataaaatttccggtaagtacaaacacaaacggaaacaaagaattaacaaagctgtagcagaccagatcggcaaattgaaatgccaggtaatccagtatatatttcgcttccagctgcctctaccctcatatctcacctgcctgtgtgtttgtgtaaattgagcttgcgaaagaggaaggtagatgctgttaatttatgggagtggaagctaaatgttgtactactggagtactgatttgtagctgatccaactgccacgagttttgggcgtcgaaattcctagacttcttgacaccgatggatggaaattatgccgacctggcgacatgatccttaagtggtgtttgaatctcgattaagataaagattaagtgtttcacgcaaaacgacaaaacgaggtggtaataacatgtgattatttgagttttaattattacaaacttgaaaaatgaattaatctgatattttagagcaattttcatatagaaaatttttgcacgaaacacatcgtttagcaatttgaaaagcgtgccacgagtatccaaaatttcattcaactcttgtcagagaaacgaacccaacctaatttcggccatcgagatttgaatattcgataagg

SEQ ID NO: 65 - DNA, 3267 bp, Oryza sativa
  misc_feature (1)..(3267): AF174093 5'-regulatory sequence
  misc_feature (1)..(2408): 5'-nontranscribed sequence
  misc_feature (2409)..(2596): Exon
  misc_feature (2597)..(3254): Intron
  misc_feature (3255)..(3267): Exon
aaaattcacaagtataattcgtcacgcactgcatgcaaatatgcagtgatgcacacacagctaacggtcccgggttctcccaccgcccatcgcctagagacaagttcaagcgcagtaccgcctacactcccatgtgctagctgcttccatgcttgcctactctctgtttacgagtagtgagaagcagagagtgagagagacgaacttgatggtgatgcaccctaacgctgcgctcccagtcaaagtcaaacgcagtagcacctagtacgctcctactccctccggaggtatcattttaattaatattttagacaatgacacggtctacaaaatatatctttaaccttatttttctattataatataaataataaataaatacatgtttacttttattatagtgctttgaaagacaaatctatacatgttgttctagttcctttaaactaaatatttttaaagttatcgatgatcaaagttataaaagtttgacctcaaccgtgtctaaaacgtcaattaatatagaatcggagggagtatactcgtagtcgtatttgatcatccataaacgcgtccaatatctttgggtaatggattttgcgacataacaaaaagtttagaccagtttttttactagagacgataacaacgtgccgagcaattttggctctcaaataatgatgttgttttttatgggaaaacggtttattttcctttgcaggttgttttcttgattatttctccagaagctcggtttatatggtattatcacttcagcttatttatatttggagcaagtggttaaggagttttatacctggcatttgggtgatgacctagttttcgagttgtaagaccttgatctcgagagtttttatgattttctctcttcttttaaggcctcgtttgatctatccttttggagataaatttttagtgcacgtaaaacgagaaacctcattaccatatgattaattaaatattaataattataaacttaaaaatagattttatctgaattttttaaacaacttctatatagaaaattttgcaaaaaaaaacacatcattgactgtttgaaaaacatgctaacggaaaaaagttgaagtttggagttgaggcaaagaacttagcctaagtgtgcagtgtcttgttcacttggttgtgtgcactatcatgatacagagggcctgtttagatcccctggtaaaattttataccatgtcacatcgaatgtttggacacatgaagtattaaatataaacgaaaaaataactaattacacaaattgcgtgaaaattgcgagacgaatcttttaagcctaattgcgccatgatttgacaatgtggtgctgcagtaaacatttgctaatgacggattaattaggcttaataaattcgtctcgcggtttacaggcggattctgtaatttgttttgttattagactacgtttaatacttcaaatgtgtgtacgtatattcgatgtgatacgcaaaactttacacccctgaatctaagggtgtgtttacaagcgaaattagtaatttgttttgttattaatctatgtttaaatgtgtgtccgtatactttaaaatttttttggccaaataactaaacacgaccatagtcccatatgctgcttttgggttagagaccagcccgatggtgacaaactgatccaactccaaccaacgtttgcgttgaggtgctctctctgaatttttcttgtgccccatgacgttgctagctgcttttgccgattagcctcgtttcgttgcttttgctctcctgctgcaatgctgcctgcggctgccacgaacttctatccgcggagagcgacgttcgttcccgatcgaacctgaaacttcctggcattttcacgcgcgcgaacgaacgaacgaacggacgaactgtactgtaaatactcaggcgcccgaacgaaagttaacgaacgaacgaaagctgaagtgctgaacgaacggtagactgtaaaactcaggcgctccgaacgagaagttcagtgaacgaaagttacagccatcggtgaattcacagtgctagtgccgtggagatcgcggcctataaatacgcttcgttgctttgctcctctccttcagctcgaaggaagccgttccagtgtctcacaagccaaggtaaagaaaaaaaagagagagaaaaaaacagagaaggaaatcaagagaagaacaccatttgattctcctctctgctcactccttctccttcttctgtttgtccgtcttggattggagctagcacttctttgactgcccttgttcatcgaggcaagtgcagaaatcttttcagtgtggctggatcccgtttaattcaagcgatttgattggggttttttggttttttcgatggacaggcggcgaggcgaggtcgcgatggggcaagggaagatcgagatgaagaggatcgaggacgcgacgaggcggcaggtgacgttcagcaagcgcagggctgggtttctcaagaaggcgaacgagctcgccgtgctgtgcgatgcgcaggtcggcgtcgtcgtcttctccgacaagggcaagctcttcgacttctgcagcccgccggtcatgtgcgccgccgccgcccggccctagcttctatctctgtttcttgttaatttgtttatgacgaaatgccaatgaaaaatctgctttaaaagaaacaagaaagagagagagagtgtgtgtgtgtgtgctgatctctaatcttgatttctatatatctgcatgccttagctgagttttcagttctttgtggtgattggtggtgtgtgcgatgattcagaaatttagcattgcatttatttgttgcagttgatatttcactcagcattccagataaatgtttgggggtactgttcgattaacatcccgatcaaatgggtagtgttcttcatgattggtagtggatttgggaaattgggatcgctttccttgcattcaacattatcactagaaatctttcgatggttcatgttctagagcttgcttttctttctgatttaatcttttctggcatcctgaaattttgatttcaggatctattcctataggacttgtgcttgctgcatagtgcattcttcaattaagcagtgcccatgaccacatcgattagtactactagaagctaatactccttttacatgtataagttcacttcattggtccaatgtactagtaataccatattgtttctggatgtaacatatttgattatgctttgttaagcttgatggagctg

SEQ ID NO: 66 - DNA, 1068 bp, Oryza sativa
  misc_feature (1)..(1068): AF174093 3'-regulatory sequence
  misc_feature (1)..(66): 3'-untranslated sequence
  misc_feature (67)..(1068): 3'-nontranscribed sequence
tgacttcctggaagcagtaggaacaacaagagttactgaaccagaaattgaacttgccttcttcatgcatcagatgaaccataaagggaacaacactactaccctctccaaaattgagctgctcaggacttcgtagaaatttacagcttcaggacatgtgatttatccattctcttttactgtttattctaaaatgcaaaaaaaaaagaaattttgttgtagcttagattaaggcagcctcagctttgtggtttgccaagccatgtactgatatatgaatgtgatactttaattaatgttgaaacgcatgattatgtatttgaactgaattgactgaatgtgtcctggaatcggtttagaacttaatatatcaatcagacttttgttctttgcttactggtttttctgtgacatggagaaaagacgttgaagacataatacatcgtcgactgaatgggtcgaccttatggcttgttttgcaaattttgaaccttgtcctggatgtagtttatttggcttgtttatccctttcgagtatataataactgaggaacttctaataagcttcttaactaaactcgctcatatgtaagtcttaattaatgtcttgaatctatacttgatagcccaaacaatatattgtatatctttttgttgtttcgccgtagcgttagcacgggcatgtaactagtataaaatagttatcaaatttttttaaaagaactgataagatagatcaatatgaaaatatttcactccataaacatacaagtttaaattcaacttttataaattacaacaaaaatgacaaatataaccgtgaatgcgggttaactatttccaatttaatttattctttttttaacatgtggacgttgaatttaggagtattataatactcaatttgttcggctttagatgagtgagaactggcacagcgagaactggcagagccctggttccggggaggcgtcggcaatggaggcgctgacgatgctgccgccggcggcggcggcgacgacggcggcggaggcgttcaattgcttcttcccggaggaggagaagggg

SEQ ID NO: 67 - DNA, 3268 bp, Oryza sativa
  misc_feature (1)..(3268): AF174093 5'-regulatory sequence engineered
aaaattcacaagtataattcgtcacgcactgcatgcaaatatgcagtgatgcacacacagctaacggtcccgggttctcccaccgcccatcgcctagagacaagttcaagcgcagtaccgcctacactcccatgtgctagctgcttccatgcttgcctactctctgtttacgagtagtgagaagcagagagtgagagagacgaacttgatggtgatgcaccctaacgctgcgctcccagtcaaagtcaaacgcagtagcacctagtacgctcctactccctccggaggtatcattttaattaatattttagacaatgacacggtctacaaaatatatctttaaccttatttttctattataatataaataataaataaatacatgtttacttttattatagtgctttgaaagacaaatctatacatgttgttctagttcctttaaactaaatatttttaaagttatcgatgatcaaagttataaaagtttgacctcaaccgtgtctaaaacgtcaattaatatagaatcggagggagtatactcgtagtcgtatttgatcatccataaacgcgtccaatatctttgggtaatggattttgcgacataacaaaaagtttagaccagtttttttactagagacgataacaacgtgccgagcaattttggctctcaaataatgatgttgttttttatgggaaaacggtttattttcctttgcaggttgttttcttgattatttctccagaagctcggtttatatggtattatcacttcagcttatttatatttggagcaagtggttaaggagttttatacctggcatttgggtgatgacctagttttcgagttgtaagaccttgatctcgagagtttttatgattttctctcttcttttaaggcctcgtttgatctatccttttggagataaatttttagtgcacgtaaaacgagaaacctcattaccatatgattaattaaatattaataattataaacttaaaaatagattttatctgaattttttaaacaacttctatatagaaaattttgcaaaaaaaaacacatcattgactgtttgaaaaacatgctaacggaaaaaagttgaagtttggagttgaggcaaagaacttagcctaagtgtgcagtgtcttgttcacttggttgtgtgcactatcatgatacagagggcctgtttagatcccctggtaaaattttataccatgtcacatcgaatgtttggacacatgaagtattaaatataaacgaaaaaataactaattacacaaattgcgtgaaaattgcgagacgaatcttttaagcctaattgcgccatgatttgacaatgtggtgctgcagtaaacatttgctaatgacggattaattaggcttaataaattcgtctcgcggtttacaggcggattctgtaatttgttttgttattagactacgtttaatacttcaaatgtgtgtacgtatattcgatgtgatacgcaaaactttacacccctgaatctaagggtgtgtttacaagcgaaattagtaatttgttttgttattaatctatgtttaaatgtgtgtccgtatactttaaaatttttttggccaaataactaaacacgaccatagtcccatatgctgcttttgggttagagaccagcccgatggtgacaaactgatccaactccaaccaacgtttgcgttgaggtgctctctctgaatttttcttgtgccccatgacgttgctagctgcttttgccgattagcctcgtttcgttgcttttgctctcctgctgcaatgctgcctgcggctgccacgaacttctatccgcggagagcgacgttcgttcccgatcgaacctgaaacttcctggcattttcacgcgcgcgaacgaacgaacgaacggacgaactgtactgtaaatactcaggcgcccgaacgaaagttaacgaacgaacgaaagctgaagtgctgaacgaacggtagactgtaaaactcaggcgctccgaacgagaagttcagtgaacgaaagttacagccatcggtgaattcacagtgctagtgccgtggagatcgcggcctataaatacgcttcgttgctttgctcctctccttcagctcgaaggaagccgttccagtgtctcacaagccaaggtaaagaaaaaaaagagagagaaaaaaacagagaaggaaatcaagagaagaacaccatttgattctcctctctgctcactccttctccttcttctgtttgtccgtcttggattggagctagcacttctttgactgcccttgttcatcgaggcaagtgcagaaatcttttcagtgtggctggatcccgtttaattcaagcgatttgattggggttttttggttttttcgatggacaggcggcgaggcgaggtcgcgttggggcaagggaagatcgagatcaagaggatcgaggacgcgacgaggcggcaggtgacgttcagcaagcgcagggctgggtttctcaagaaggcgaaccagctcgccgtgctgtgcgaagcgcaggtcggcgtcgtcgtcttctccgacaagggcaagctcttcgacttctgcagcccgccggtcatgtgcgccgccgccgcccggccctagcttctatctctgtttcttgttaatttgtttatgacgaaatgccaatgaaaaatctgctttaaaagaaacaagaaagagagagagagtgtgtgtgtgtgtgctgatctctaatcttgatttctatatatctgcatgccttagctgagttttcagttctttgtggtgattggtggtgtgtgcgatgattcagaaatttagcattgcatttatttgttgcagttgatatttcactcagcattccagataaatgtttgggggtactgttcgattaacatcccgatcaaatgggtagtgttcttcatgattggtagtggatttgggaaattgggatcgctttccttgcattcaacattatcactagaaatctttcgatggttcatgttctagagcttgcttttctttctgatttaatcttttctggcatcctgaaattttgatttcaggatctattcctataggacttgtgcttgctgcatagtgcattcttcaattaagcagtgcccatgaccacatcgattagtactactagaagctaatactccttttacatgtataagttcacttcattggtccaatgtactagtaataccatattgtttctggatgtaacatatttgattatgctttgttaagcttgaccaccatgg

SEQ ID NO: 68 - DNA, 1065 bp, Oryza sativa
  misc_feature (1)..(1065): AF174093 3'-regulatory sequence engineered
  misc_feature (1)..(63): 3'-untranslated sequence
  misc_feature (64)..(1065): 3'-nontranscribed sequence
cttcctggaagcagtaggaacaacaagagttactgaaccagaaattgaacttgccttcttcatgcatcagatgaaccataaagggaacaacactactaccctctccaaaattgagctgctcaggacttcgtagaaatttacagcttcaggacatgtgatttatccattctcttttactgtttattctaaaatgcaaaaaaaaaagaaattttgttgtagcttagattaaggcagcctcagctttgtggtttgccaagccatgtactgatatatgaatgtgatactttaattaatgttgaaacgcatgattatgtatttgaactgaattgactgaatgtgtcctggaatcggtttagaacttaatatatcaatcagacttttgttctttgcttactggtttttctgtgacatggagaaaagacgttgaagacataatacatcgtcgactgaatgggtcgaccttatggcttgttttgcaaattttgaaccttgtcctggatgtagtttatttggcttgtttatccctttcgagtatataataactgaggaacttctaataagcttcttaactaaactcgctcatatgtaagtcttaattaatgtcttgaatctatacttgatagcccaaacaatatattgtatatctttttgttgtttcgccgtagcgttagcacgggcatgtaactagtataaaatagttatcaaatttttttaaaagaactgataagatagatcaatatgaaaatatttcactccataaacatacaagtttaaattcaacttttataaattacaacaaaaatgacaaatataaccgtgaatgcgggttaactatttccaatttaatttattctttttttaacatgtggacgttgaatttaggagtattataatactcaatttgttcggctttagatgagtgagaactggcacagcgagaactggcagagccctggttccggggaggcgtcggcaatggaggcgctgacgatgctgccgccggcggcggcggcgacgacggcggcggaggcgttcaattgcttcttcccggaggaggagaagggg

SEQ ID NO: 69 - DNA, 7967 bp, Oryza sativa
  misc_feature (1)..(7967): AF204063 5'-regulatory sequence
  misc_feature (1)..(2163): 5'-nontranscribed sequence
  misc_feature (302)..(302): r is a or g
  misc_feature (1620)..(1620): s is c or g
  misc_feature (2164)..(2421): Exon
  misc_feature (2422)..(7951): Intron
  misc_feature (7952)..(7967): Exon
acaaatttgttgtaccacctacctaggggtgacaacactgcacatttggctatttagggccacgcatatatgcatgaaaaattgacacacgacgttacttgagaacctattcatgcaggtctatgagaaaaccccaccaaaaaaaacagatgtgcaaaataatgctggattttcatatgctataaattaagtactactttaatcaaacaccacattgacacacaatgacacaaattaaatactcttacgaattcaagtcatatatactctaatacgcacgtgcagcttgttactcaaataargaaacagggcaatacggatcagtatatccaaccaggctgcatgtaggccaagaacctgacaattcgttttccttggagaaagcaaagaacgtttggaacgtgtgatgtacatgcagatcgaggaaaatagctaatcctgctctttccctttccagcacaaaaaaagattccttcgtagttcgcactgcatttatactcaaacctgcaaggctcccaaacagtttgaaccaaggcgagggaaaaaaaaaacatctccatagccaagagaaaacatactgtacatgtcaagagattccctcttcatattcttacaatcctatttactcaaattaaatcttcatatttcacttcgtaaattccaacggctaatttggtcagcacaaattcagcatctcaatcaacacaatttcaatgcatgaaggcgatcaagctcaccactctcctgccatacaagatggaccgccaccgcttggaatttccgcagtgacggcaacacgaggaagaggcaacactagcggatgtatgaaggagtctgccaagctcggctatttccggcgagcttgagagtataatcgagatagaggccggtggaaagacgaaaggcggcgtactcttgggcttagtgtggaggcaacggtggcggcctcgcggagaggtgacgacaccttggcttggcatggcagagttccacttctcaacagggatgcatgacactcctaggtaagaaggcggcggtgctggtgggtgtgggtggaggcacatggacttctctcaacaataaagttgctctcgctgtcaaactattccctctgccaagtttgatcactcaatttcttgatttggctagtcggataagatagtcaccgacatagccaaccagatgggataacccctttttttttagcatggagagtgggaccaaatgtccaagctatctcccatactccctatgtccaaaaaaaaataatattttttaaattcatatctaacatacgaagataatactcttcgttgaaaaaaaaacaacttcagaatctagacacaactttattttttataagacggaaagactgtactcctatactcctacatttcaccatttttttccccgcgtaaaaacaaacccccgaattgaccgtccactgtagcatcactccatcagacttgaagcgagtgagagacagagcgctgcgttaaaaagaaaagaggaaagaaccggacgcagagccctactgtcaaactgacaaggcaggaaggaagaaaagggaagccccccctaccaagccctagcctccttgtccgtttgctcccccccagsgccaccccccgtcgacacgcgtcgcccaccctctgccattccctcttccgccctcccagccactactacgcttttactccctgccgcgcgcgcgagatcttcaccttcaccgtatccgctcgcgttttgcacgcagttgatttgcgctttgtttttgcatcctacgaaactaaccgcacaccaatcacctcctccaccaccgcacagagctatagctagcgaggagcgtgctacagtgcgctgcgcaggagagagaatcgatcgatggaagaacgcgacaggagcaagctagccagcctagctgtagcgacgtgacagcagtttgatctttctttttttcttatgatggctaagcttatacgtaagccgatcgatcgatggcgagatagatcagagattaatatacaggggtaattaatgtactaattacaattaagtgtgtggacgagcgagccgtgtggagttacagctagctagcgcttatgctactcctacttaaggcgagaccccaaactccaagcatacgatcaggtagccaaaccacaccaccataaagctagcttgcaaaggggatagagtagtagagagagagagagaggagaggaggaggaagaagatggggagggggaaggtggagctgaagcggatcgagaacaagatcagccggcaggtgacgttcgccaagcgcaggaacggcctgctcaagaaggcctacgagctctccctcctctgcgacgccgaggtcgccctcatcatcttctccggccgcggccgcctcttcgagttctccagctcatcatggtacgtatagcaccaaaccaacgccgccgccgccgccggcgtgcttgttccggcgcagcagcgcatcatcatcgatcgatctaagtctaataagataatcaattaaccctaactaaataaaatgataagaacagtatatatggttatgatcagtgaaacactcgtcgatctgagggaaaatccggtcgagatcgagggagtggggagacaaattgaactgcaggctagctaatttaatcgtgtcgatcgatttctagcttttgttgatctttatatatacgaacgcatgcactttcccctttgtttttttttcccttcgatctgcttggagctcatatgctatagatcttggggcatatgtatctgtcagctttcgagagcggctatgtccatcgatccctcttttttttctctttctttttgtagtatcagctgccatgcatatatcagatttcgttttcgcgtgcttttagtgcttcacttatctgttcgccatatctgatttcttctcatcctttgccgacgtcgtctgagcagtctgacctccaagatctggcgaaataaacctcaatcgttgctatttcttgccttgaatctgcataaacatgacaatagatccttctattttttttcttcaagacaagatcttgctgtttcttcccttgctatttttcattcaaagattcttcttttttttctaaaagaactatatatatatgaatcgagtttcatcttcatcgatctgtctctctccttttgttttctgtaaacacacacacgagcgtacgtatatatactctcatctctacttttatcaaaaagaaacacacatgttctagcttcagatcccaaaataatcaaacaggaaaatatatataatatgcaattagttcagatcccgaggtagatttcttgattatttccattttccaaagtgaggcgcgcgacaactcgacgcggttcctctttgcacacacacacagtataactgtacgcaaggggtaagaacaaaggagcaatcccttctgggttgctgcttgcttctcccatttttagctatttcagaatttcactttctgagactcatctctctctctctaccagctgcattatttcacttcccttttttcccatttctgcctattacacggatggcctctttgtggactcgtccaaattgaggcacggtagctggtgtcaaaatgaacctgcaggcccagcccggttatgtatatgtatagctatatagcttttcttgcaagaggtatatacactttgtagttttagccagtggtccagctagccatggatggatatattatacacacgtatatatagtacatgtatgtacgagtgttaattaaactcgtttagttaatttccaaagtccttttttattactacagctagcctgatctgtgttttagtgtgttactgttccattagttactgttctattgaagagagcgcgtacacgttgttgttttatttctctttttccgatccggtgttccttttttttttcttttggtcatcttcctcgagtcccgagcagtagaaatactactactgccctgcaaagcacacacatcaagtgatgtgtttttcttcagagcttcagacgtgtcatatcaagcaggtcagcacgcattacatgcaatataatactcctatatggacacgcagaactcactttgatcatgtgtgaccaagctggatgagccgttaatttgttgttgggacagggtattgaatcattaattgcggtttttcctctttttcctgtcttgttctactcagagaattgaacggtgaactgtataggcagagctagtcctgcatgcatcggttttctgaaattattaactatacacacacatgcacaattgctaaatctggtatacatgtcttgctgactcacatattcgttcctcctaattaaagcactcatttatttattttacacggttttcaatgatatactttaaatattaatttgtttgatgttatatttctatgaatatgaaattagcatcatatgaaaatactttaaaacaaatatagtgatataacatgcataatacttagcatatacttgtatgattagcatggtcattaatcaaaagttgccgagcttgaattttctaaaggacagggtgccttgtaatttgggacaaagaaccattggaaaacgaacacaaagaaactttcattacattaattatctgaaaaagaaagaaactttcattaacctcgtacagtaaatagaaaagaggaactatgcatgtataacgaaatagctaggatcacagcaattaattagttgttctctggctttacttttcttttggagtaactttaatttttctttggaggatgaagtagttaattatacaggtttccaattcttgtttggtagatccttttttatgttcctggaagagctactatatttttgtacttgagatggagctgaggtaccgttatctagctatgtcgcatctcaaggagttacgaattaacatatatcaccaatatcacaaaaatgctccatacaaaaagatcataaaaattcttgaatttgcttgctgtgtttttttactatatatgcttggaattaaaaaaatgactgaattaatcgtttgcaatctttaacggtgcgtgcagtaccaaattggaaaggtatccacttgttcaaacttaaaaatattttttttactgatattactctctaaaaaggtgcatgggaaatgctattggaactactagttttcgggacattataagaaaatgtatgcatatatatatatatatatggacttatgatatgggccagatacctatatatatagaagatatatgtgtgctactacctccattcaacaatacaagcatttgagccagttctggtcaaggatataaacatcctgcactattagcttgtacttgtcaaattaatgatctctaattcaaactttcttgctactttacccccaatcacccttcccaaccatcttaatctttgctaaacattctagaaatgcttattgttggatggaggaagtagctattaactactcctatagtttttttaactacctcatattaattttgtaatcctaataaatgcactatatatgcccacttttaccgtgtttccaaactggcatcaagctaaaatgaatgttaatttagtttccccataattttatgagaatcgcaaaattgtacctattttaaacaaatcaaagtcactgaacaaatgaacggaggttaattattatattcacctgatataggcagactaggttgggctaagagggacattaatttgggcatctaggttttgaaatgggagatatggagagtgaaccaaaaaaaaactgttagtgaattagtacatgatatatactagtattattagtgggaacctagagaaatgcaaagaatgttgcgcaaatcatcattttgtgtaaattaaaatgggatatacactatggggaactatagctgagtgtcaatccccaccttttgtttgtaattaaacatgtgtttatgctacaaattactccctccgtactcataaaggaagtcgtttaggacaatgtttaagtcaaaccttgggaatataaattatgaataactctcaagttgttgagtttgaaaatgtaaaaaatatatgaatagatttgtcttgaaaaatactttcataaaagtatacatatatcacttttcaataaatattttatagaaacaagaagtcaaaattgtgttttggagaccgtgtcactgtccaaaacgacttctttacgagtacggagggagtatgttctacatattggctaatattgttgaacccttcggatcaatcttagacacagtagccattttacccactgatgcagcaacccaattaggtatctactaattagcatcatagtgcaaatttgtacttttcaagtggaaaatagaaattatttgtcctcctttactttaatttcttgataatatgatatatgtaacataatttctctttgctcccaagcatataaaaaacttcaatttgatatgtccaaaaaatgtcatatatatagcatgtaatcctctgtggcaaacacgtttttttggctcaaattaagaagaggaaaaaatggtatatatgtataaacctaacaaaaatgccccaacaagaatagctttattttgtgaacaaggtcatatagaccagggaacaaaaaccctgtactgtgcttctattttgctatgcattttggataagtgattctacagaaatatgactatataggagatattctcaaatctgatcttttctattaattagcccatacgatatgaagacatatcttcctctgttctgattctatttgttgtgctaagatagtctacaggatttgctaggttgccacctgccgtcaacaaaattcagctcatcagattttgttatagttgctagcacagttatattatacgtatatctcttttgagaatatattattacagtccattgatttttcttgtagagtggaaaatattattgtgttttctaaccgtaggagttcatgtggtgttatttattttggataatgtggtgtatttttatgagaaatcaggatcgcgtcaacatgaaagtttcatctaatacattattaagtgcatcgtagcaacaattcatatattaactcaaaggtagctttgaaattaagatgcatgtcattaatgcataatagagaaatcaggttaccaaattatattaagcccatatattaactcaaaggtcatagctttgacaaatgctccttacagatttctccttgaaccaatttgtaaaatatcctctcctttttttttgcgcgaacgctaaatatcctttgtttaacaacctcgtcaatttgtccatttcatatgtgtgaacatccttgtacattcttttttgtgccgtttgaaataaaactttgaataaatatgcacaacttaaatgcttaaatgtcaattggatttggatgaaacaaaaccaaagttttagaatttacgatctatcattatgaatttatgtatgatatatcacactctttctgaataaacttcagaataatataaattgcttaattatggtatacatgagcatatatagcttgcgcaaatcaaaactgtacagtaggtgtgtgttcaattcagaatagtattctatttcgaatttaaattaataataccttctgtagtaatttctatattagaaaatttatacatacaaggagcactgttaattagctagctagctttatgggttccactaatcaatttatatataataatgtgctaaactatacagcgtccatgcatttttattcttcatgcctaattaatttgattcaccattaattaattctacgtacaatgttcgaatgtgtgactatatatgctgcatctgcagttctgcacctcattcagtactaaattcaagttcaggttcattaattaattcacttattccttcatttttcacttccagcatgtacaaaaccttg

SEQ ID NO: 70 - DNA, 1181 bp, Oryza sativa
  misc_feature (1)..(1181): AF204063 3'-regulatory sequence
  misc_feature (1)..(329): 3'-untranslated sequence
  misc_feature (330)..(1181): 3'-nontranscribed sequence
tgatgtgtgtgttcagttcaggcttcaggcttcagagaagccaatgcaaacagtgtcctgtaatccagtaattacagggcatatgtaatgtaatgtaatgtaatccctgatctatattttgctaagtacgtgcgtgctctcttacgaccttctcccccaaacagttaatcaggggaataataatttcgtttgatgcacgtactgtatgtctgtatctgtcactgtatcgtaggaccgtccatgtataacaatttccgttttggatgtggtaacaagttaattggcacttaaatttatatttgtgatgatctgggagagtacctaatctcaaaaacttgtggagattatgttagggagtagtgcaagaaatgttttaagacggcagctgttatctcatgagatattgataatgatgttgtctctgctgctgtcgcgatcgccaaattatgctgtttttttagattataccgaaatatgctgatggatacgtggttttgatctgtggccgttgcgaagtaagcgcgatttatttctgcaggcgttcgaatcacgttttactgttggcggtagttactgcacggtgactgttcgacgaaatgccaaaacaacccgcaggctgcagccagtcgacatgtgcggcggccgtcgcccgatcgcgcggctagctagtagctgtcggcaccgccggttggttacccgcaccaccgggccctcgccgtcgccgtcggccgtccttgcgctgcacggacgcgtcacgcgcactgccgcctgcctgcctttgcgctgtcgggcgggcgcgcgggcagaaagcgaccgcgcgcgcggaggggggcgccctcttccacacgcagcgatgcggaggcggcactggcacggaactcccaccgagccgacgggcccgcccgcccggcggccggccgcgccgcgccagcagctggacgaacatgcgtgcacagcgcgcgcgcaggcgaggcgcggcgcgacgtggtgcttcggctcgcgtcctcgcgtacgtacgccgccacggccaccaccgccatcagtgtcgcgttatgcacttactcatactgaacactggacagagcacgatatgcagcggtgtttgtaccgcccggcccaagggacggcagactcgccggcagaaaatcaaattaaaattgcaatgttgcaagtatatgcag

SEQ ID NO: 71 - DNA, 7968 bp, Oryza sativa
  misc_feature (1)..(7968): AF204063 5'-regulatory sequence engineered
  misc_feature (302)..(302): r is a or g
  misc_feature (1620)..(1620): s is c or g
acaaatttgttgtaccacctacctaggggtgacaacactgcacatttggctatttagggccacgcatatatgcatgaaaaattgacacacgacgttacttgagaacctattcatgcaggtctatgagaaaaccccaccaaaaaaaacagatgtgcaaaataatgctggattttcatatgctataaattaagtactactttaatcaaacaccacattgacacacaatgacacaaattaaatactcttacgaattcaagtcatatatactctaatacgcacgtgcagcttgttactcaaataargaaacagggcaatacggatcagtatatccaaccaggctgcatgtaggccaagaacctgacaattcgttttccttggagaaagcaaagaacgtttggaacgtgtgatgtacatgcagatcgaggaaaatagctaatcctgctctttccctttccagcacaaaaaaagattccttcgtagttcgcactgcatttatactcaaacctgcaaggctcccaaacagtttgaaccaaggcgagggaaaaaaaaaacatctccatagccaagagaaaacatactgtacatgtcaagagattccctcttcatattcttacaatcctatttactcaaattaaatcttcatatttcacttcgtaaattccaacggctaatttggtcagcacaaattcagcatctcaatcaacacaatttcaatgcatgaaggcgatcaagctcaccactctcctgccatacaagatggaccgccaccgcttggaatttccgcagtgacggcaacacgaggaagaggcaacactagcggatgtatgaaggagtctgccaagctcggctatttccggcgagcttgagagtataatcgagatagaggccggtggaaagacgaaaggcggcgtactcttgggcttagtgtggaggcaacggtggcggcctcgcggagaggtgacgacaccttggcttggcatggcagagttccacttctcaacagggatgcatgacactcctaggtaagaaggcggcggtgctggtgggtgtgggtggaggcacatggacttctctcaacaataaagttgctctcgctgtcaaactattccctctgccaagtttgatcactcaatttcttgatttggctagtcggataagatagtcaccgacatagccaaccagatgggataacccctttttttttagcatggagagtgggaccaaatgtccaagctatctcccatactccctatgtccaaaaaaaaataatattttttaaattcatatctaacatacgaagataatactcttcgttgaaaaaaaaacaacttcagaatctagacacaactttattttttataagacggaaagactgtactcctatactcctacatttcaccatttttttccccgcgtaaaaacaaacccccgaattgaccgtccactgtagcatcactccatcagacttgaagcgagtgagagacagagcgctgcgttaaaaagaaaagaggaaagaaccggacgcagagccctactgtcaaactgacaaggcaggaaggaagaaaagggaagccccccctaccaagccctagcctccttgtccgtttgctcccccccagsgccaccccccgtcgacacgcgtcgcccaccctctgccattccctcttccgccctcccagccactactacgcttttactccctgccgcgcgcgcgagatcttcaccttcaccgtatccgctcgcgttttgcacgcagttgatttgcgctttgtttttgcatcctacgaaactaaccgcacaccaatcacctcctccaccaccgcacagagctatagctagcgaggagcgtgctacagtgcgctgcgcaggagagagaatcgatcgatggaagaacgcgacaggagcaagctagccagcctagctgtagcgacgtgacagcagtttgatctttctttttttcttatgatggctaagcttatacgtaagccgatcgatcgatggcgagatagatcagagattaatatacaggggtaattaatgtactaattacaattaagtgtgtggacgagcgagccgtgtggagttacagctagctagcgcttatgctactcctacttaaggcgagaccccaaactccaagcatacgatcaggtagccaaaccacaccaccataaagctagcttgcaaaggggatagagtagtagagagagagagagaggagaggaggaggaagaagatcgggagggggaaggtggagctgaagcggatcgagaacaagatcagccggcaggtgacgttcgccaagcgcaggaacggcctgctcaagaaggcctacgagctctccctcctctgcgacgccgaggtcgccctcatcatcttctccggccgccgccgcctcttcgagttctccagctcatcttggtacgtatagcaccaaaccaacgccgccgccgccgccggcgtgcttgttccggcgcagcagcgcatcatcatcgatcgatctaagtctaataagataatcaattaaccctaactaaataaaatgataagaacagtatatatggttatgatcagtgaaacactcgtcgatctgagggaaaatccggtcgagatcgagggagtggggagacaaattgaactgcaggctagctaatttaatcgtgtcgatcgatttctagcttttgttgatctttatatatacgaacgcatgcactttcccctttgtttttttttcccttcgatctgcttggagctcatatgctatagatcttggggcatatgtatctgtcagctttcgagagcggctatgtccatcgatccctcttttttttctctttctttttgtagtatcagctgccatgcatatatcagatttcgttttcgcgtgcttttagtgcttcacttatctgttcgccatatctgatttcttctcatcctttgccgacgtcgtctgagcagtctgacctccaagatctggcgaaataaacctcaatcgttgctatttcttgccttgaatctgcataaacatgacaatagatccttctattttttttcttcaagacaagatcttgctgtttcttcccttgctatttttcattcaaagattcttcttttttttctaaaagaactatatatatatgaatcgagtttcatcttcatcgatctgtctctctccttttgttttctgtaaacacacacacgagcgtacgtatatatactctcatctctacttttatcaaaaagaaacacacatgttctagcttcagatcccaaaataatcaaacaggaaaatatatataatatgcaattagttcagatcccgaggtagatttcttgattatttccattttccaaagtgaggcgcgcgacaactcgacgcggttcctctttgcacacacacacagtataactgtacgcaaggggtaagaacaaaggagcaatcccttctgggttgctgcttgcttctcccatttttagctatttcagaatttcactttctgagactcatctctctctctctaccagctgcattatttcacttcccttttttcccatttctgcctattacacggatggcctctttgtggactcgtccaaattgaggcacggtagctggtgtcaaaatgaacctgcaggcccagcccggttatgtatatgtatagctatatagcttttcttgcaagaggtatatacactttgtagttttagccagtggtccagctagccaaggatggatatattatacacacgtatatatagtacatgtatgtacgagtgttaattaaactcgtttagttaatttccaaagtccttttttattactacagctagcctgatctgtgttttagtgtgttactgttccattagttactgttctattgaagagagcgcgtacacgttgttgttttatttctctttttccgatccggtgttccttttttttttcttttggtcatcttcctcgagtcccgagcagtagaaatactactactgccctgcaaagcacacacatcaagtgatgtgtttttcttcagagcttcagacgtgtcatatcaagcaggtcagcacgcattacatgcaatataatactcctatatggacacgcagaactcactttgatcatgtgtgaccaagctggatgagccgttaatttgttgttgggacagggtattgaatcattaattgcggtttttcctctttttcctgtcttgttctactcagagaattgaacggtgaactgtataggcagagctagtcctgcatgcatcggttttctgaaattattaactatacacacacatgcacaattgctaaatctggtatacatgtcttgctgactcacatattcgttcctcctaattaaagcactcatttatttattttacacggttttcaatgatatactttaaatattaatttgtttgatgttatatttctatgaatatgaaattagcatcatatgaaaatactttaaaacaaatatagtgatataacatgcataatacttagcatatacttgtatgattagcatggtcattaatcaaaagttgccgagcttgaattttctaaaggacagggtgccttgtaatttgggacaaagaaccattggaaaacgaacacaaagaaactttcattacattaattatctgaaaaagaaagaaactttcattaacctcgtacagtaaatagaaaagaggaactatgcatgtataacgaaatagctaggatcacagcaattaattagttgttctctggctttacttttcttttggagtaactttaatttttctttggaggatgaagtagttaattatacaggtttccaattcttgtttggtagatccttttttatgttcctggaagagctactatatttttgtacttgagatggagctgaggtaccgttatctagctatgtcgcatctcaaggagttacgaattaacatatatcaccaatatcacaaaaatgctccatacaaaaagatcataaaaattcttgaatttgcttgctgtgtttttttactatatatgcttggaattaaaaaaatgactgaattaatcgtttgcaatctttaacggtgcgtgcagtaccaaattggaaaggtatccacttgttcaaacttaaaaatattttttttactgatattactctctaaaaaggtgcatgggaaatgctattggaactactagttttcgggacattataagaaaatgtatgcatatatatatatatatatggacttatgatatgggccagatacctatatatatagaagatatatgtgtgctactacctccattcaacaatacaagcatttgagccagttctggtcaaggatataaacatcctgcactattagcttgtacttgtcaaattaatgatctctaattcaaactttcttgctactttacccccaatcacccttcccaaccatcttaatctttgctaaacattctagaaatgcttattgttggatggaggaagtagctattaactactcctatagtttttttaactacctcatattaattttgtaatcctaataaatgcactatatatgcccacttttaccgtgtttccaaactggcatcaagctaaaatgaatgttaatttagtttccccataattttatgagaatcgcaaaattgtacctattttaaacaaatcaaagtcactgaacaaatgaacggaggttaattattatattcacctgatataggcagactaggttgggctaagagggacattaatttgggcatctaggttttgaaatgggagatatggagagtgaaccaaaaaaaaactgttagtgaattagtacatgatatatactagtattattagtgggaacctagagaaatgcaaagaatgttgcgcaaatcatcattttgtgtaaattaaaatgggatatacactatggggaactatagctgagtgtcaatccccaccttttgtttgtaattaaacatgtgtttatgctacaaattactccctccgtactcataaaggaagtcgtttaggacaatgtttaagtcaaaccttgggaatataaattatgaataactctcaagttgttgagtttgaaaatgtaaaaaatatatgaatagatttgtcttgaaaaatactttcataaaagtatacatatatcacttttcaataaatattttatagaaacaagaagtcaaaattgtgttttggagaccgtgtcactgtccaaaacgacttctttacgagtacggagggagtatgttctacatattggctaatattgttgaacccttcggatcaatcttagacacagtagccattttacccactgatgcagcaacccaattaggtatctactaattagcatcatagtgcaaatttgtacttttcaagtggaaaatagaaattatttgtcctcctttactttaatttcttgataatatgatatatgtaacataatttctctttgctcccaagcatataaaaaacttcaatttgatatgtccaaaaaatgtcatatatatagcatgtaatcctctgtggcaaacacgtttttttggctcaaattaagaagaggaaaaaatggtatatatgtataaacctaacaaaaatgccccaacaagaatagctttattttgtgaacaaggtcatatagaccagggaacaaaaaccctgtactgtgcttctattttgctatgcattttggataagtgattctacagaaatatgactatataggagatattctcaaatctgatcttttctattaattagcccatacgatatgaagacatatcttcctctgttctgattctatttgttgtgctaagatagtctacaggatttgctaggttgccacctgccgtcaacaaaattcagctcatcagattttgttatagttgctagcacagttatattatacgtatatctcttttgagaatatattattacagtccattgatttttcttgtagagtggaaaatattattgtgttttctaaccgtaggagttcatgtggtgttatttattttggataatgtggtgtatttttatgagaaatcaggatcgcgtcaacatgaaagtttcatctaatacattattaagtgcatcgtagcaacaattcatatattaactcaaaggtagctttgaaattaagatgcatgtcattaatgcataatagagaaatcaggttaccaaattatattaagcccatatattaactcaaaggtcatagctttgacaaatgctccttacagatttctccttgaaccaatttgtaaaatatcctctcctttttttttgcgcgaacgctaaatatcctttgtttaacaacctcgtcaatttgtccatttcatatgtgtgaacatccttgtacattcttttttgtgccgtttgaaataaaactttgaataaatatgcacaacttaaatgcttaaatgtcaattggatttggatgaaacaaaaccaaagttttagaatttacgatctatcattatgaatttatgtatgatatatcacactctttctgaataaacttcagaataatataaattgcttaattatggtatacatgagcatatatagcttgcgcaaatcaaaactgtacagtaggtgtgtgttcaattcagaatagtattctatttcgaatttaaattaataataccttctgtagtaatttctatattagaaaatttatacatacaaggagcactgttaattagctagctagctttatgggttccactaatcaatttatatataataatgtgctaaactatacagcgtccatgcatttttattcttcatgcctaattaatttgattcaccattaattaattctacgtacaatgttcgaatgtgtgactatatatgctgcatctgcagttctgcacctcattcagtactaaattcaagttcaggttcattaattaattcacttattccttcatttttcacttccagcatctacaccaccatgg

SEQ ID NO: 72 - DNA, 1178 bp, Oryza sativa
  misc_feature (1)..(1178): AF204063 3'-regulatory sequence engineered
  misc_feature (1)..(326): 3'-untranslated sequence
  misc_feature (327)..(1178): 3'-nontranscribed sequence
tgtgtgtgttcagttcaggcttcaggcttcagagaagccaatgcaaacagtgtcctgtaatccagtaattacagggcatatgtaatgtaatgtaatgtaatccctgatctatattttgctaagtacgtgcgtgctctcttacgaccttctcccccaaacagttaatcaggggaataataatttcgtttgatgcacgtactgtatgtctgtatctgtcactgtatcgtaggaccgtccatgtataacaatttccgttttggatgtggtaacaagttaattggcacttaaatttatatttgtgatgatctgggagagtacctaatctcaaaaacttgtggagattatgttagggagtagtgcaagaaatgttttaagacggcagctgttatctcatgagatattgataatgatgttgtctctgctgctgtcgcgatcgccaaattatgctgtttttttagattataccgaaatatgctgatggatacgtggttttgatctgtggccgttgcgaagtaagcgcgatttatttctgcaggcgttcgaatcacgttttactgttggcggtagttactgcacggtgactgttcgacgaaatgccaaaacaacccgcaggctgcagccagtcgacatgtgcggcggccgtcgcccgatcgcgcggctagctagtagctgtcggcaccgccggttggttacccgcaccaccgggccctcgccgtcgccgtcggccgtccttgcgctgcacggacgcgtcacgcgcactgccgcctgcctgcctttgcgctgtcgggcgggcgcgcgggcagaaagcgaccgcgcgcgcggaggggggcgccctcttccacacgcagcgatgcggaggcggcactggcacggaactcccaccgagccgacgggcccgcccgcccggcggccggccgcgccgcgccagcagctggacgaacatgcgtgcacagcgcgcgcgcaggcgaggcgcggcgcgacgtggtgcttcggctcgcgtcctcgcgtacgtacgccgccacggccaccaccgccatcagtgtcgcgttatgcacttactcatactgaacactggacagagcacgatatgcagcggtgtttgtaccgcccggcccaagggacggcagactcgccggcagaaaatcaaattaaaattgcaatgttgcaagtatatgcag

SEQ ID NO: 73 - DNA, 3979 bp, Oryza sativa
  misc_feature (1)..(3979): AF345911 5'-regulatory sequence
  misc_feature (1236)..(1546): Exon
  misc_feature (1547)..(3962): Intron
  misc_feature (1963)..(3979): Exon
gaaaatctcaaggtttcgaaaacgacatggtacgtcgtgcgcgtatatgtaactattgaccatgtattcatatgcacgaattggtacaaaagggtgcacaaattctgcaataactgttggaaatgtatatatattcatacatatgtgtgtacactgctctctccatctctaaaataccttatactccctccatttcatattgtaagactttctagcattgtttatatttatatagatgttaatgaatttagacacacacacacacacacacacatatatatatatatatatatatatatatatatatatatattcattaacatatatatgaatgtggccaatgctaaaaattcttacattgtgaaacggatgaagtagtatttagctggtctcagatatattagtatggttgtgaaaagacgaatatgcacttcattaagattatatgcttctattatactacatgtttagctagacttttggcatgcccaagctctaacaaatgatttttgcacctaaatcgatttcaattaggtgggcgagagtggggtttaaccaatagagataaaataaggacaataaaaacagctagtggaccacatatctccacacgtctcttaaaaaaagatttattttacaactgaatttgaagataaggtattttgtaattgagaaagtaaataccaatatactccctccggttatttatatttatatttagcgttagaaaagttaaacttagttttcccatctttaaatatatatagtgaatggatcgtatcgtaaaaaaaaagacaaccggattatagttaaataattggccatgtattgatatggtgcaaattaacaaaatttcgcagtaatgattggccatgtattcatgtgtacatttatcaatatatcaataaaaaagacaagaggataataatagtaataataaagaaatggagaaaaggagtcgaggggttgggagttcgaccgtacgaggaggtagcatagcagcagaatcgaccccaagctttccttctcacgtaacatgccgttattatattatatatattaaaataattaatccaattattttttaccagattaatattaatgtaatccgtgtgtcagcaggcttgagaggctgcaggtgggccccatgattccgggaccaatcacagctcgacagcatactgacacccgtccccaaaagcaaagaggcctctctctctctctctcgccgatccctctcctcctcctcttcttcttcttccactagctagttcgtcttcctccttcagctagcttgtagcagctaaggttaggtcggatcgagatcgggatcggccgccggcgagcggcgagcggcgaggatggggcgggggaaggtgcagctgaagcggatagagaacaagatcaacaggcaggtgacgttctccaagaggaggaatggattgctgaagaaggcgcacgagatctccgtcctctgcgacgccgaggtcgccgccatcgtcttctcccccaagggcaagctctacgagtacgccactgactccaggtacacctatagcctgatcgattccttgccatttctggagcacctgagcccgcctgagatggatgaactcaataattctcctagctttttgccgtttctggccggccgcttccatggatttcagctgctgctctctgaatttgccatgtttggtttgtgcatctggttgcatgtgtgctacagctgatgattttatgcttcactagtgctgcaacacatgcaacacagtccaatccaagctagctcagctactccaggaggaggagtcagctgcatgcctcctcatttcgggaaatcatctctctctctttctattttttccctttcctttcttgtttcccctttttctttcctgctagcttgcttctctctctacaccctgcataccctttttgggattgatggccggttttaattaatttcccctcctttctttagttaattactaccctactactaattcatctcctcccgatcctctcaatttctcatcatatggagtactactaaaatatatatatgtagtacgcacttggtgtggccggtctttgttaacatcatgtgcttgcttagattcaaggggattatatatataagaggatctactactaagtgtactttgtgattacatcagctatctatgtagctgatgatcttgctttggtcttttgctgatccattgagctagtgctaattctcatcacccttccatttgatgtactgcaaatagttttttattcattcgcttcttctccctcttccccatgtgatttgattgctagctccttcctgacttttatttgggttgatttcgtcacatcttcctctcaaattaatctcatgcgcgtgcctttgttctccacctgtcaagaaattaattaaagaatatatcacacgaattacgaggagtccaccaccagtgtcatgcactcctccctattgttcacagtcacagctgatgcatgcaaaacatcttctgtttctcaagtaattaattcccctcttcttgtgaggcttggcttaaaattactcaaacagctgtttttcttgcttatgcatcatcttcctcagataccaaaacgttggagatggacagatctggcctttcctcttcccttctctctcatcctcttctatgtttctgcctcttcttatgatgaatctttatttggtattattcacgttaagcatctctttaaagagccctagatcaaatttgatctatctcttttggtttaacttcatggccagttgcttgtgtgttttggtctagaacgaccacgtacgcgagatatttccttttctgctcagctgattaattaataatgatgggataattcactaattattctggagttagatcaagagatgtacttaaacatcctgtgacacgatgacttcaaaaaataatcttgctctctgtaaaatcacataatagctagccatcgcgcgtgtttcagaaaaataatttatcttgcttgctagcttttgctcaaaatgcgtttctgacgtctaggtaaagaggacttttacggtcgtctgtgttgtactggaacagtgccctgcacactccccagcgtcaagatcagtctaaggcgcttcatttctagctcagaaatcttcacttatttgatcttaattatagatcttcctgagatagatctaagggtgttccagtaaaacagaagaagtcaagttcttcaggatcctcgtgatataattaaactgtagtctcacaatcttactgatcatcaaggagtctgtaaacacctatacgtacggctataggattatggggaggttggtctaaaataaaggtgttaaattacttgcaattatcaagatgtgcaaatcatcacccagtaattcaatggtgctattatatatagtctgttttgaacagttccactggttttgttagggtccttgctgatggctgtttaacggtgctgttatatataatcttgattattttttttgctaaattttcctaagcaacccacttcaaattttggaatgggtgaattcttatgttcacaccctcatatcacatgtgtcatgaggagcttttttttcgtcacacagtcccatacaacgtccctgttttcttgaagataagataattcatgcatgcacttgaatataaccgagtgttttcatgtgcatgctttttatttggctgtgtcgagtgtttagacagcaaaagagctcttgtgcatacaaatgccgatatctatatattagtagtcttaatccacatttcagctttaattgcttggaatagtttggtaggcattcctagcttcagaccatttaaatatacttcctaaacgttgtcatgagaatgctgaatgcaaagtatttacatatatagtggactaatttcagattctgctcatgatggttttccctgcaggatggacaaaatccttg

SEQ ID NO: 74 - DNA, 1422 bp, Oryza sativa
  misc_feature (1)..(1422): AF345911 3'-regulatory sequence
  misc_feature (1)..(424): 3'-untranslated sequence
  misc_feature (425)..(1422): 3'-nontranscribed sequence
taagatgatcatcgtcgtcgtcgtcggccaaacagctgccgtatgcaccgtgaatcatgggagcaaccttgaatgaattgaagtcattggtatcgatcctagcgataatatatatgattctcctaaaatgaaattgatctcaaaaaaacaaacctagcgattaagctattcttatatatgtgtttgcctgctgccccctaccctacaggctacatatgatttgcaagaaattaattatgagcaaggatcaggatgtgtctttgtgtaatcatcagcacgtacctagtgcttcctactgatatatatgcatgcaattgtgtgcatataaatatatttgcatgccatgctcccgtgatggttaattaatttatgattgtgtttatacgctaattaactgcagatgcaaactaatcaatcgaattatatatcttttgtgattggatatatggcaggggattacatttggtggtttctcaattaattcattattatggaaatttaagagttcaagataatttatatgataataggtgtatatagataatcgttagtatttattagtgactacaaatgaatagatatgtactactggttaattagaactgcaagttatgcatgtatatatattgtctccatatatttattaattaacacgactcattatgaaagagaagaactattccatggtaattgtaccatcaggtatgtgctaaaaattgtttctcttttgatgggatcgagatattcacattgaaacataaatgagtgaactgatcatccttctctttctagctgattgaacttttcattgaattgtctagtccacagcagaacatcacgttgaaatatataagtgaattatatgttttcttgggttacatgtaattaatacgcacacacatcgtactcacacccacatatacaccctccaaatatacttaaaagtgacgaaggccagcgacatttaatttacaggacttcattggagggagcttctagctgttacagtttctcgcagaatcagaagctccccaaatagtctagcttttggtttagattctaataagttgtagtggtagaattcagaaaatgaactagaagccaaaagctggcaaacctagttttttcaaattctcagaagctggctaccaatcagttacttttcaaaatcttaagctcctccaaacaagctctaaaattacgttgaaagtgttgcttgtcgtaatagtgctgagggtagatgggctgtacaccccgaaaaagttttgcgcaaaacaaaacatactgtataaatgaaacaatttatattcgacaaaggaaacctagctattcaagggaataaatctataccgtacgagccaatttgataatctgttggtaaatgtcactactatatctaatttatcttgccatttaagtcaa

SEQ ID NO: 75 - DNA, 3980 bp, Oryza sativa
  misc_feature (1)..(3980): AF345911 5'-regulatory sequence engineered
gaaaatctcaaggtttcgaaaacgacatggtacgtcgtgcgcgtatatgtaactattgaccatgtattcatatgcacgaattggtacaaaagggtgcacaaattctgcaataactgttggaaatgtatatatattcatacatatgtgtgtacactgctctctccatctctaaaataccttatactccctccatttcatattgtaagactttctagcattgtttatatttatatagatgttaatgaatttagacacacacacacacacacacacatatatatatatatatatatatatatatatatatatatattcattaacatatatatgaatgtggccaatgctaaaaattcttacattgtgaaacggatgaagtagtatttagctggtctcagatatattagtatggttgtgaaaagacgaatatgcacttcattaagattatatgcttctattatactacatgtttagctagacttttggcatgcccaagctctaacaaatgatttttgcacctaaatcgatttcaattaggtgggcgagagtggggtttaaccaatagagataaaataaggacaataaaaacagctagtggaccacatatctccacacgtctcttaaaaaaagatttattttacaactgaatttgaagataaggtattttgtaattgagaaagtaaataccaatatactccctccggttatttatatttatatttagcgttagaaaagttaaacttagttttcccatctttaaatatatatagtgaatggatcgtatcgtaaaaaaaaagacaaccggattatagttaaataattggccatgtattgatatggtgcaaattaacaaaatttcgcagtaatgattggccatgtattcatgtgtacatttatcaatatatcaataaaaaagacaagaggataataatagtaataataaagaaatggagaaaaggagtcgaggggttgggagttcgaccgtacgaggaggtagcatagcagcagaatcgaccccaagctttccttctcacgtaacatgccgttattatattatatatattaaaataattaatccaattattttttaccagattaatattaatgtaatccgtgtgtcagcaggcttgagaggctgcaggtgggccccatgattccgggaccaatcacagctcgacagcatactgacacccgtccccaaaagcaaagaggcctctctctctctctctcgccgatccctctcctcctcctcttcttcttcttccactagctagttcgtcttcctccttcagctagcttgtagcagctaaggttaggtcggatcgagatcgggatcggccgccggcgagcggcgagcggcgaggatcgggcgggggaaggtgcagctgaagcggatagagaacaagatcaacaggcaggtgacgttctccaagaggaggaatggattgctgaagaaggcgcacgagatctccgtcctctgcgacgccgaggtcgccgccatcgtcttctcccccaagggcaagctctacgagtacgccactgactccaggtacacctatagcctgatcgattccttgccatttctggagcacctgagcccgcctgagatggatgaactcaataattctcctagctttttgccgtttctggccggccgcttccatcgatttcagctgctgctctctgaatttgccatgtttggtttgtgcatctggttgcatgtgtgctacagctgatgattttatgcttcactagtgctgcaacacatgcaacacagtccaatccaagctagctcagctactccaggaggaggagtcagctgcatgcctcctcatttcgggaaatcatctctctctctttctattttttccctttcctttcttgtttcccctttttctttcctgctagcttgcttctctctctacaccctgcataccctttttgggattgatggccggttttaattaatttcccctcctttctttagttaattactaccctactactaattcatctcctcccgatcctctcaatttctcatcatatggagtactactaaaatatatatatgtagtacgcacttggtgtggccggtctttgttaacatcatgtgcttgcttagattcaaggggattatatatataagaggatctactactaagtgtactttgtgattacatcagctatctatgtagctgatgatcttgctttggtcttttgctgatccattgagctagtgctaattctcatcacccttccatttgatgtactgcaaatagttttttattcattcgcttcttctccctcttccccatgtgatttgattgctagctccttcctgacttttatttgggttgatttcgtcacatcttcctctcaaattaatctcatgcgcgtgcctttgttctccacctgtcaagaaattaattaaagaatatatcacacgaattacgaggagtccaccaccagtgtcatgcactcctccctattgttcacagtcacagctgatgcatgcaaaacatcttctgtttctcaagtaattaattcccctcttcttgtgaggcttggcttaaaattactcaaacagctgtttttcttgcttatgcatcatcttcctcagataccaaaacgttggagatggacagatctggcctttcctcttcccttctctctcatcctcttctatgtttctgcctcttcttatgatgaatctttatttggtattattcacgttaagcatctctttaaagagccctagatcaaatttgatctatctcttttggtttaacttcatggccagttgcttgtgtgttttggtctagaacgaccacgtacgcgagatatttccttttctgctcagctgattaattaataatgatgggataattcactaattattctggagttagatcaagagatgtacttaaacatcctgtgacacgatgacttcaaaaaataatcttgctctctgtaaaatcacataatagctagccatcgcgcgtgtttcagaaaaataatttatcttgcttgctagcttttgctcaaaatgcgtttctgacgtctaggtaaagaggacttttacggtcgtctgtgttgtactggaacagtgccctgcacactccccagcgtcaagatcagtctaaggcgcttcatttctagctcagaaatcttcacttatttgatcttaattatagatcttcctgagatagatctaagggtgttccagtaaaacagaagaagtcaagttcttcaggatcctcgtgatataattaaactgtagtctcacaatcttactgatcatcaaggagtctgtaaacacctatacgtacggctataggattatggggaggttggtctaaaataaaggtgttaaattacttgcaattatcaagatgtgcaaatcatcacccagtaattcaatggtgctattatatatagtctgttttgaacagttccactggttttgttagggtccttgctgatggctgtttaacggtgctgttatatataatcttgattattttttttgctaaattttcctaagcaacccacttcaaattttggaatgggtgaattcttatgttcacaccctcatatcacatgtgtcatgaggagcttttttttcgtcacacagtcccatacaacgtccctgttttcttgaagataagataattcatgcatgcacttgaatataaccgagtgttttcatgtgcatgctttttatttggctgtgtcgagtgtttagacagcaaaagagctcttgtgcatacaaatgccgatatctatatattagtagtcttaatccacatttcagctttaattgcttggaatagtttggtaggcattcctagcttcagaccatttaaatatacttcctaaacgttgtcatgagaatgctgaatgcaaagtatttacatatatagtggactaatttcagattctgctcatgatggttttccctgcaggatcgacaaccaccatgg

SEQ ID NO: 76 - DNA, 1419 bp, Oryza sativa
  misc_feature (1)..(1419): AF345911 3'-regulatory sequence engineered
  misc_feature (1)..(421): 3'-untranslated sequence
  misc_feature (422)..(1419): 3'-nontranscribed sequence
gatgatcatcgtcgtcgtcgtcggccaaacagctgccgtatgcaccgtgaatcatgggagcaaccttgaatgaattgaagtcattggtatcgatcctagcgataatatatatgattctcctaaaatgaaattgatctcaaaaaaacaaacctagcgattaagctattcttatatatgtgtttgcctgctgccccctaccctacaggctacatatgatttgcaagaaattaattatgagcaaggatcaggatgtgtctttgtgtaatcatcagcacgtacctagtgcttcctactgatatatatgcatgcaattgtgtgcatataaatatatttgcatgccatgctcccgtgatggttaattaatttatgattgtgtttatacgctaattaactgcagatgcaaactaatcaatcgaattatatatcttttgtgattggatatatggcaggggattacatttggtggtttctcaattaattcattattatggaaatttaagagttcaagataatttatatgataataggtgtatatagataatcgttagtatttattagtgactacaaatgaatagatatgtactactggttaattagaactgcaagttatgcatgtatatatattgtctccatatatttattaattaacacgactcattatgaaagagaagaactattccaaggtaattgtaccatcaggtatgtgctaaaaattgtttctcttttgatgggatcgagatattcacattgaaacataaatgagtgaactgatcatccttctctttctagctgattgaacttttcattgaattgtctagtccacagcagaacatcacgttgaaatatataagtgaattatatgttttcttgggttacatgtaattaatacgcacacacatcgtactcacacccacatatacaccctccaaatatacttaaaagtgacgaaggccagcgacatttaatttacaggacttcattggagggagcttctagctgttacagtttctcgcagaatcagaagctccccaaatagtctagcttttggtttagattctaataagttgtagtggtagaattcagaaaatgaactagaagccaaaagctggcaaacctagttttttcaaattctcagaagctggctaccaatcagttacttttcaaaatcttaagctcctccaaacaagctctaaaattacgttgaaagtgttgcttgtcgtaatagtgctgagggtagatgggctgtacaccccgaaaaagttttgcgcaaaacaaaacatactgtataaatgaaacaatttatattcgacaaaggaaacctagctattcaagggaataaatctataccgtacgagccaatttgataatctgttggtaaatgtcactactatatctaatttatcttgccatttaagtcaa

SEQ ID NO: 77 - DNA, 2300 bp, Oryza sativa
  misc_feature (1)..(2300): AF424549 5'-regulatory sequence
  misc_feature (1)..(1998): 5'-nontranscribed sequence
  misc_feature (1)..(2300): n is a, c, g, or t
  misc_feature (319)..(319): n is a, c, g, or t
  misc_feature (1999)..(2186): Exon
  misc_feature (2187)..(2287): Intron
  misc_feature (2288)..(2300): Exon
tacaaagtgctggaagtgatagtatgtgggcattaagtggtgcctggactagaaagttgcagcgagtgttttccacttgtgtccaatggcgcatgattgaccgtgtcgtcctcgtcgccgttgcatttatggaactgagctgcccatcccctctcctccgtagcaaaggcatcacagattcacaggtcgcccatcacgtcgatcgatcagtaactgttacagcaagcatgtagaatagccatttctgaacctgcgaggttgcatctatccatggttaaaacaagtcgccgtactacgaaccattggtgccatatgtccnttgattcgttgggggtgacatgactagtcacgagctgcctatatgtaacactagaagaggcttctagtggtcgtagtagcttggtttggttgctggacaatgagagttggtagcaagaggtgcaccctgctgtccccccggttcagggataaaatgaagcacaggctggaacttagattgtctagagatggtaattggtcaattggtgaagttgtgacttgtgattacgagcatcttgctcttgcaggacattgctctccccttcgctcgtaattggtagtttgttgtcattggccttgttttgatcctccgggctattaaatagctatccggaatcttgctatttaggattattaaacgtagattaccgacaaaaccgatcccataacccctagactattttgcgagacgaatctaatgatgtatattaatccataattagcggctgattactgtagcatcactgtagcaaatcatggattaatatacctcgttagattcgtttcgcaaaatagcctaggggttatggaatgagttttgtcagtattctaagtttaatactcttaaatagcaagatttcggagggctatttaatagccctccggatccaaacagggccattgtcttttaaaaacacctaggggtcttctggccagctccacgagatggtgggttagacggcctgggttcaaaacctcaccccttctaattatttgatattatgtcattttctaatattcgcgtctgttttgttgtcatcgtctttctaagcgtgcgtgcttgcaaaggaaaggagtagagagagagagaggcacatcagcagatcgagagagagaagctggtatgacaaaagaaaagaaaagacagaagatgactcatgcacacttgcgaaatcaaaccaaaagagaatcaaagcgaggcaatatgtacgcgcagaagcaatgatgaagcgaaagccgaaatggtgctaaccgttgggcggccagccacgcatgcagcgaatcggtcgatcgatcatgcagctgctaacacacacacaagagaagacgagacgaaactcagccggccggtgattcgatcgagagtaggtgacacagccaagcaggatagaggctatttttaggagagcttctagctgctgcaacttctctcagaattagaagctcccccaaacagtatatcttttggttcatattctaagaagttgtagttgtagaatccagaaagtgaaccagaagctagaagctgaaaaacctagcttttcaatattctcagaagctgtagttgtaaaatctagaaaatgaatcagaaaccaaaaaaatgaaaaatccagcttttctagattcttataaattgtctacaaatcagctgcttctcataattttaaactccacaaatactgcaggatccgtctccgcgaaccgagagacgttacggtatacggagtgggcacgattgctttcacgagttgggaatccgttgctgtcgtacgtctcgtctatggcgtgctgtatgtcctctccttctttcttcctttccaaataagcactcctcttcttcctcctcctcctcctccgcctcctcttctcattcccaactcatcgatccatcagtagctagctagctagctagctagctgcattgtccggcgagagagatagctgctgcagggggcggccatggggaggggcaagatcgagatcaagcggatcgagaacgcgaccaacaggcaggtgacctactcgaagcgccgcacggggatcatgaagaaggccagggagctcaccgtgctctgcgacgcccaggtcgccatcatcatgttctcctccaccggcaagtaccacgagttctgcagcccttccaccgagtctgtatctccatctccacttcgactctatgatcttctccatcctgattatactatatatataactgcatcatatcgatcttaattgcatcctgctgcagcatcaaggggatc

SEQ ID NO: 78 - DNA, 1500 bp, Oryza sativa
  misc_feature (1)..(1500): AF424549 3'-regulatory sequence
  misc_feature (1)..(3): natural stop codon
  misc_feature (4)..(1500): 3'-nontranscribed sequence
tgagatatcatcgccgccgccgccgccgccgccggcggcctgctcgtcgccggccggccggccgccggacaccgtatcatcgctcgatctagataacaagccgacgaataaattgcagtgctcgtgttacttacctgcatgcgcatgcattattatcgatcaacgcaagaacttcatttcatttaccaaaccacttgatgtgtgctatgatccagcggttaaaccgtgtgttgtctcttgacattttgtaccagttactgatgatgttgtattatgtatgcgtggtgtgcaactgtgcttggataatttcacacttatttgccacgcttgctttattagctttgactatcaagctactgatcagagagttacctagctcaaaggattaattattatgtatacagctcaaatacattaatgggctactggctgctgctgtccgagtaattatttacacctgtggtatatcgcttagtccgttttgttgggattttgttgttggtcttatgtcatcttggtgtgttttgttgtttttttctctttatttgtgtgttttttctttggctctttggggaggtttttacctcctatgttctcttcttaatgaaatggcgcacaattcttttgcgattttgaggaaaaaaaaaagattacctccgtggccaatcagcaagctcgccctcgccggccggcgagggcgaggagatcgccgttgttggctgttgtttgggctggacagcccaacaattactgctcagtagcccactctgggtgaaagcccgctcagcccgatagagttaacttccgtgggccgatttgtcgcgcaaccaaggtggcccgctccgcctccttcgttgcacgtgggcccataccacggtgaaaccatgtgtgggccttagttgggcttaactctggcccattaataatcgctggacagcgtccatgctagctactgcatttcttttttcgatttcagtaccacggaaagctataagcatcaccagaatttggacgaaaattctatataaacatcaccttgaatttacacgaaaatttcacattttcaatgtatattcgtttaaaaatgtaatcaccgcaggttagtgcactacacagccaaggagataattgctgtaattaacaatgttatcctcgactaaattaaggtattaaattttctgtacgtactttcagtcgcctgttcaacatggaaattaagaaatgcaaagtagaagagacaaattaacagcggcttttggccgcctacttttcaagttcatgtgctaagcatatggcattgctaatcatggggtcgtattaaggaatcataatcatcatggtgatcatcatcatcacaaggtgattaattaaataataaagatttaaaggcggccggcaccagctgagactaagactgggctctgggctcaatcagacgcaccggactttcagctaaaagggcctcgtcaaaggtgcttgggcctcgccaagataataaaa

SEQ ID NO: 79 - DNA, 2301 bp, Oryza sativa
  misc_feature (1)..(2301): AF424549 5'-regulatory sequence engineered
  misc_feature (1)..(2301): n is a, c, g, or t
  misc_feature (319)..(319): n is a, c, g, or t
tacaaagtgctggaagtgatagtatgtgggcattaagtggtgcctggactagaaagttgcagcgagtgttttccacttgtgtccaatggcgcatgattgaccgtgtcgtcctcgtcgccgttgcatttatggaactgagctgcccatcccctctcctccgtagcaaaggcatcacagattcacaggtcgcccatcacgtcgatcgatcagtaactgttacagcaagcatgtagaatagccatttctgaacctgcgaggttgcatctatccatcgttaaaacaagtcgccgtactacgaaccattggtgccatatgtccnttgattcgttgggggtgacatgactagtcacgagctgcctatatgtaacactagaagaggcttctagtggtcgtagtagcttggtttggttgctggacaatgagagttggtagcaagaggtgcaccctgctgtccccccggttcagggataaaatgaagcacaggctggaacttagattgtctagagatggtaattggtcaattggtgaagttgtgacttgtgattacgagcatcttgctcttgcaggacattgctctccccttcgctcgtaattggtagtttgttgtcattggccttgttttgatcctccgggctattaaatagctatccggaatcttgctatttaggattattaaacgtagattaccgacaaaaccgatcccataacccctagactattttgcgagacgaatctaatgatgtatattaatccataattagcggctgattactgtagcatcactgtagcaaatcatggattaatatacctcgttagattcgtttcgcaaaatagcctaggggttatggaatgagttttgtcagtattctaagtttaatactcttaaatagcaagatttcggagggctatttaatagccctccggatccaaacagggccattgtcttttaaaaacacctaggggtcttctggccagctccacgagatggtgggttagacggcctgggttcaaaacctcaccccttctaattatttgatattatgtcattttctaatattcgcgtctgttttgttgtcatcgtctttctaagcgtgcgtgcttgcaaaggaaaggagtagagagagagagaggcacatcagcagatcgagagagagaagctggtatgacaaaagaaaagaaaagacagaagatgactcatgcacacttgcgaaatcaaaccaaaagagaatcaaagcgaggcaatatgtacgcgcagaagcaatgatgaagcgaaagccgaaatggtgctaaccgttgggcggccagccacgcatgcagcgaatcggtcgatcgatcatgcagctgctaacacacacacaagagaagacgagacgaaactcagccggccggtgattcgatcgagagtaggtgacacagccaagcaggatagaggctatttttaggagagcttctagctgctgcaacttctctcagaattagaagctcccccaaacagtatatcttttggttcatattctaagaagttgtagttgtagaatccagaaagtgaaccagaagctagaagctgaaaaacctagcttttcaatattctcagaagctgtagttgtaaaatctagaaaatgaatcagaaaccaaaaaaatgaaaaatccagcttttctagattcttataaattgtctacaaatcagctgcttctcataattttaaactccacaaatactgcaggatccgtctccgcgaaccgagagacgttacggtatacggagtgggcacgattgctttcacgagttgggaatccgttgctgtcgtacgtctcgtctatggcgtgctgtatgtcctctccttctttcttcctttccaaataagcactcctcttcttcctcctcctcctcctccgcctcctcttctcattcccaactcatcgatccatcagtagctagctagctagctagctagctgcattgtccggcgagagagatagctgctgcagggggcggcgatggggaggggcaagatcgagatcaagcggatcgagaacgcgaccaacaggcaggtgacctactcgaagcgccgcacggggatcatcaagaaggccagggagctcaccgtgctctgcgacgcccaggtcgccatcatcaagttctcctccaccggcaagtaccacgagttctgcagcccttccaccgagtctgtatctccatctccacttcgactctatgatcttctccatcctgattatactatatatataactgcatcatatcgatcttaattgcatcctgctgcagcatcaccaccatgg

SEQ ID NO: 80 - DNA, 1497 bp, Oryza sativa
  misc_feature (1)..(1497): AF424549 3'-regulatory sequence engineered
gatatcatcgccgccgccgccgccgccgccggcggcctgctcgtcgccggccggccggccgccggacaccgtatcatcgctcgatctagataacaagccgacgaataaattgcagtgctcgtgttacttacctgcatgcgcatgcattattatcgatcaacgcaagaacttcatttcatttaccaaaccacttgatgtgtgctatgatccagcggttaaaccgtgtgttgtctcttgacattttgtaccagttactgatgatgttgtattatgtatgcgtggtgtgcaactgtgcttggataatttcacacttatttgccacgcttgctttattagctttgactatcaagctactgatcagagagttacctagctcaaaggattaattattatgtatacagctcaaatacattaatgggctactggctgctgctgtccgagtaattatttacacctgtggtatatcgcttagtccgttttgttgggattttgttgttggtcttatgtcatcttggtgtgttttgttgtttttttctctttatttgtgtgttttttctttggctctttggggaggtttttacctcctatgttctcttcttaatgaaatggcgcacaattcttttgcgattttgaggaaaaaaaaaagattacctccgtggccaatcagcaagctcgccctcgccggccggcgagggcgaggagatcgccgttgttggctgttgtttgggctggacagcccaacaattactgctcagtagcccactctgggtgaaagcccgctcagcccgatagagttaacttccgtgggccgatttgtcgcgcaaccaaggtggcccgctccgcctccttcgttgcacgtgggcccataccacggtgaaaccatgtgtgggccttagttgggcttaactctggcccattaataatcgctggacagcgtccatgctagctactgcatttcttttttcgatttcagtaccacggaaagctataagcatcaccagaatttggacgaaaattctatataaacatcaccttgaatttacacgaaaatttcacattttcaatgtatattcgtttaaaaatgtaatcaccgcaggttagtgcactacacagccaaggagataattgctgtaattaacaatgttatcctcgactaaattaaggtattaaattttctgtacgtactttcagtcgcctgttcaacatggaaattaagaaatgcaaagtagaagagacaaattaacagcggcttttggccgcctacttttcaagttcatgtgctaagcatatggcattgctaatcatggggtcgtattaaggaatcataatcatcatggtgatcatcatcatcacaaggtgattaattaaataataaagatttaaaggcggccggcaccagctgagactaagactgggctctgggctcaatcagacgcaccggactttcagctaaaagggcctcgtcaaaggtgcttgggcctcgccaagataataaaa

SEQ ID NO: 81 - DNA, 5900 bp, Oryza sativa
  misc_feature (1)..(5900): AJ293816 5'-regulatory sequence
  misc_feature (1)..(1856): 5'-nontranscribed sequence
  misc_feature (1)..(5900): n is a, c, g, or t
  misc_feature (203)..(203): n is a, c, g, or t
  misc_feature (244)..(244): n is a, c, g, or t
  misc_feature (492)..(492): n is a, c, g, or t
  misc_feature (1793)..(1793): n is a, c, g, or t
  misc_feature (1857)..(2095): Exon
  misc_feature (2096)..(5583): Intron
  misc_feature (3710)..(3711): n is a, c, g, or t
  misc_feature (5584)..(5900): Exon
caaacattttaaactttaaccattaatagaaaaaagatcaatcatgaaaaaaaatgatgttactggatttatcatcaaacagactatcatagtatgtaactctttttatttaaatcatcttacttttatagatattgttggcaaagtagcatctcgaaaaccgtgtcagggtccaaaaatgcttatattttgaggtggatggngtaacaagtttcccaaacaattaagcttttcgtccagattntaagaagttgaagtcagagtctaaaaaacaaactagaagtataaggtgtgaaacctagttttttagattatcagaagatgactatcaaatgctccctccgtcaaaaaaaaaagcaacctagagccacatctccttctagtagtacaaacgaatctgaacaaccctcctagatccacatctcctcctaaattgtctttttttttggacgaatcggggggtaccccatatgtcaaaaaggaattcaactntacggatgaatctgaacatatggattttcttttaatggaaagggtataattaccccatctgtaaaaaaaaaaaccactaacttagttaaacctatttgatgtgattgattttttttaacgaagtgaggagggtgtttgggaaacagagacttattccaagtctctgtcacatcgaatgtttggatactaatttagagtattaaacatactgtaattataaaacccattccataaccttggactaattcgcgagacgaatcttttgagtctaattacgccatgatttgacaatgtgatgctacagtaaacttttcataattatggattaattaggcttaaaaaattcgtctcgcatattagctcttatttatgaaattagttttttttattagtctatatttaatactctaaattagcgtcaaacatccgatatgacatggactaaaaagttttagcctcacctaaacaccccttaattcttaaaattttaagctcttcgaaatagttccgaaggctcttgaacccagaactatgtgacttttcaaaatgtcaaaagttgcaggggcaatggcgtggagggagggtacactagtccctgcgtccccaggggatgtttagatatacagttgtaaagttttagcgtgtcacatcggatattgtattatggtgttgtatgggttgttcgggctctaataaagaaactaattacataatccgtcaataaaccgcgagatgaatttattaaacctaattaatccatcattagcaaatgtttactgtagtatcacattatcaaatcatagagcaattaggcttaaaattttcgtttcacaaattagtcgtaatatgtacaattaaatttttttctaaacctatatttaaaactttatagagatgttcaaacgttcgatatgatatggtgaaaatttttaagttgagatctagacggggcctgagtcctaaccacctcgtggcggacacctgcctccgtccctgtggctccaccacttgaaagcctttgccataaaaagtaggagtcgtcctactcctacccctacccctacccctgctgcagtgctataggctagccctacctccctgctcctgtttcctctctttctctctcgcctccttcgcttcgcttccattggtggtggtctccattgctcccttcctccctgcctttttcttccataagtagtagtagtagcggaattggccgccgccgcagccatagatctgcggcgccgcgtatctcgcggctggtttggctggtgcggttagcggctagggttttggtngtttcgtctgatcgatcctccccgattttgcggcggcggtggtgaattggtgtgtgatctgatatggctggcggcggcggtggcgggggaaggggggagggggaggggagggcggcgacggggaagagggagaggatagcaatacggaggatcgacaacctggcggcgaggcaggtgaccttctcgaagcggaggagggggctgttcaagaaggccgaggagctctccatcctctgcgacgccgaggtcgggctcgtcgtcttctccgccaccggcaagctcttccaattcgccagcaccaggtatgcatgtatatacagttatacacacaccaacacatatatgcttctctcttcctcgccggcgtctccttcgctcgctcgcagttatttctgtttaatttgcttgcaattaaatctcgatctgggtgatgatctctctgtcggttcttggaatatcgtactattgttagggctctttgtcgatcgatcagggtttcttttttcttctgaaatttccctaattgatttgccggtaagttacgttcttcattttggcgtgtttaattagtataaaatttatcataataaacataaaattctagtttatcgtgcttctaattgagttgttcagttgaggagttgagattgaggtcatggctttccaatttcggattttcggtcagctcttttttcttggatatactccatatacacaacagtgatagatgtgtatattttttctcatcatcggctctttcaatcttaaaacagttttgtctttggtttatatagaattcgctagtgtgtgtactgtgtaaaattctttcaatcctacaacagttttgtctttgtcttttgctttctctgattctacaaaatgcttttgattgttcggcgctttgattcattttcttctagatgagtaatgtaatatgttcttctagggaatgttctttaattcccaggaaaaaaatgtcccagcttcttaaatagagctctctgtatatgatgttattaattatagctccatagtgcgcttaatttgaaatattgtttagcacttatgtcgtgttctcttctatctttcactcgacccattttttataatgaaaatggttaatttacaccgataggcacacggctatatatatataagcatatatagttttttttttcactcttgaagtcagcaatcttattcagttaatttaagaccgtatggaagagactcggcagagaggggtgttttctctcttttggactggatgaccagagataaatagcagattttcttgggaaaaaaaaactaaagtaggacaggttttgcatgcatgtgtgaaagcactcgtggaaaacttaccctgttctcgcatgatttgatgtgtagttgttatacatatagataaccatatctacattattgcttctggttggatcttctcataaaactgcatctttctccatctttttctacaagctcagtggacttccaagtatcttctctgctaatttcttgacactgccgttctttccacgtttgttacattattgcttttgacatcactattttaattaattagatcttgtagacaacaccctggacgcttatcaggaaacagactatatatcgttcaaagttttttgttgaaattttaactcgtaaaaaccatctggttttagttaatctcatcgatattattttcttcattaaagcaggaataagaaggcatgtagtttgtacatgcatatatatactgaaattaattattacagctttcagagatcagcagcagatttgtcatgacaattacatattcttcatgcatgagtaaatatatatatatatattcaattctgttgcttttgtcacgaatagttgttagttttaacgcgagcgtgcttaaactgaccattnnttttaagcaacttcaaaataaaaaggtttaagtccaactcattcataaattatttttttattacaaatctaatggtataactttgatgctaaatactaactagatttcttaaaaatattgttggtcaaacatagctaggcaactcaatgaaaactaacaactatttaattcaaattatttttaatggatatggtatatatcggtatacagtctaattaatttgtcaactgaacttgggttactgatggttctaaccattgtgtatacatatatgcaaacaaatttagtcctaattatatgtcgtaacatgagggtacgtactgtgttgatcgttttgtgttatgaactaatcacatggaaagaagtgcatatatatatctaatgtcaagagtgttgttaactgataccccacatatatataccagaatgtttacagtgttaattaacacatggcaaaatcaagcaaaaatacaaccaatctaaacttgttaattgttcaatctttgtattcggggtaactaattaagctagagctgtcaaacgaaacgacctctgatagtagcacacatatatgggattctccaaagtgataggtttgcgactgttaattgtttgttttttttttctccacaagcgacgacagaaaactagctagtcgatctattcttttcatgtacatcacttacactatttgccagtgcatgacatgatctatcagcatgcatggatatagagtgtgcataccaattggcctggtagctagaaaaagattgaccaatccaatcaaatggatccctgagcttacgtaccgctatcagagtttgtccaaatatattttcaattataatatataaaaatataagtagatatttaattttattaaagtactttttaaaactaatctatgttccagtgtttttttaagctaaatatttaaaattgttaaagttctagtcaaacatgataattatggaattagaaggagtacgtacataagagcaagtataataaaactcaagatcgtgcttataagactcaagtgttgtcttttaacagtgttatgttgcatttggtgatgagtgtggggtaagtgaggagagagagaacgaacaatctctcagtataaaaagcagcctctacataatttaaaaagtgcaaatactagtgtgatagtaaacaaataaataacattagagtttgtgtattatggatgagatatattgtactacctttgtctctaaatacaaaagattttgcttatgtagatatatatatgggcaaaatctcttaagatgaaggtagtacacatgttttatatatatatatacacctcctgatcgaatcgatgaggagatatgagggataaaattaaaggcggtagacatctctattattaaacttggctagcactactactagtctacatgtataaacatgaaaccattaatcacacacacagagagataaaagaaaaaaaacaagaaaacaacagaaatgactgcttaaatggagcatatatagaaaaaacataatataattattggaagatagatagatgcaaagaatattttctaaaagattggacctcaagttaaaagttctctaatatccctatgattcgagccaaccataaggaatttcataggaatttggaatgactattccttcgttccgattagacatatatatagggttttctcaactttataaaatttatttaaatttcctttgtttgaaaagagccataagatatagtactagttcatcatgtcataatacataacaagaaccataagatatagtcatgtgtcttcgtcttctagacttctactattcctgctgcctgtgccatgtcatgcatgcatggtccatgcatgaaatattgatggccacagaacaagctacgcgtggcttacctcttcacagaagcaattgtattttcttcttctcgttctctgaaacaatcaatatggtagttcagaacattcatatccttccaatatggtagttcagaagcaattgtattttgaagggcctagaagaactacctaacaatatttggtactactagcatcttgatgaaaacgtttggattcaacattacaaaccttagctagctctacaaacatccaactctgtctaactttgttttctatatatacattgatgaagcatggaacagattattg

SEQ ID NO: 82 - DNA, 1297 bp, Oryza sativa
  misc_feature (1)..(1297): 3'-regulatory sequence
  misc_feature (1)..(297): 3'-untranslated sequence
  misc_feature (298)..(1297): 3'-nontranscribed sequence
tgatggctggaaactaaaactgagaggaaacagctggatggcatgcctgcatcgccaaatgatcagtgcatgcactgcaagactgcaacaaataacacagttttagattgccagatgatgatgtgtgtgtgctgagagtcactggctattatcgtacacataataacaatagaacgaacaagttcttctgttcttggatgttacctgaattctactcccatacatgttgtcaatggctctgtaatcgagtgtctgcaattccagctgaaagcaaccgattacagggaaataagctattttttcttaaagttctagctagcttggtacagttcataagccgtagaaaaacaaaggcaaataggacaatatatcaaaagtcatttttaggtaaagcttttatatctccattcttaccggtttgaaagcaaagtctgcaaaataagactacgatgaatgtcaccaagggaggaaaatccacaagcgaagcatatcgcatctaactttcaggctaatctgcatgcattatacaaagagcgatttttttgggaactaatgaattgacatgcatcgtccattaaaatagaggcctgcatgctttgggcgggcaagatatgttccattgcgtcatatggattggactaaaagtgagatgtcagctttagaatcttgagctggaaacgcattatctgacagttgaatgtgcaaaggttggagcaaactcatctcgtccaccgggaagacgataaaatgcgtccagatctcgctcatgtacataaaaatttcagattgcgaaattatccccagggttaaaagttagcactagtaaagtacttttagtttagggcaatgatgcacaagcctttagcgtgcactggatcggaaaatcagtaaagctttcagttttgttgattctggctgtcagattaaacaatgcaagtagtactgagatgaaaaaaaaagttaactttagccctgcttcgattttctttggccttttcaaattttaatctttctgaagaagttagtgtaggttagcagaatggcagagcagaggaatgttctagtagagcggaaattcagtaaaaaattcagttttgttgaatgtgactatcagattaaacatgtagccatcagtactgaggtaaaaaagttagctttagcctgcttcgattttctttagcctttgcaagttttaagctactgaagaagttagggcatgcatggttagcagaacggcagagcagagcagatgaatgcaggatgatgcagaggagagccagggccgaaatgtttcaaa

SEQ ID NO: 83 - DNA, 5901 bp, Oryza sativa
  misc_feature (1)..(5901): AJ293816 5'-regulatory sequence engineered
  misc_feature (1)..(5901): n is a, c, g, or t
  misc_feature (203)..(203): n is a, c, g, or t
  misc_feature (244)..(244): n is a, c, g, or t
  misc_feature (492)..(492): n is a, c, g, or t
  misc_feature (1793)..(1793): n is a, c, g, or t
  misc_feature (3710)..(3711): n is a, c, g, or t
caaacattttaaactttaaccattaatagaaaaaagatcaatcatgaaaaaaaatgatgttactggatttatcatcaaacagactatcatagtatgtaactctttttatttaaatcatcttacttttatagatattgttggcaaagtagcatctcgaaaaccgtgtcagggtccaaaaatgcttatattttgaggtggatggngtaacaagtttcccaaacaattaagcttttcgtccagattntaagaagttgaagtcagagtctaaaaaacaaactagaagtataaggtgtgaaacctagttttttagattatcagaagatgactatcaaatgctccctccgtcaaaaaaaaaagcaacctagagccacatctccttctagtagtacaaacgaatctgaacaaccctcctagatccacatctcctcctaaattgtctttttttttggacgaatcggggggtaccccatatgtcaaaaaggaattcaactntacggatgaatctgaacatatggattttcttttaatggaaagggtataattaccccatctgtaaaaaaaaaaaccactaacttagttaaacctatttgatgtgattgattttttttaacgaagtgaggagggtgtttgggaaacagagacttattccaagtctctgtcacatcgaatgtttggatactaatttagagtattaaacatactgtaattataaaacccattccataaccttggactaattcgcgagacgaatcttttgagtctaattacgccatgatttgacaatgtgatgctacagtaaacttttcataattatggattaattaggcttaaaaaattcgtctcgcatattagctcttatttatgaaattagttttttttattagtctatatttaatactctaaattagcgtcaaacatccgatatgacatggactaaaaagttttagcctcacctaaacaccccttaattcttaaaattttaagctcttcgaaatagttccgaaggctcttgaacccagaactatgtgacttttcaaaatgtcaaaagttgcaggggcaatggcgtggagggagggtacactagtccctgcgtccccaggggatgtttagatatacagttgtaaagttttagcgtgtcacatcggatattgtattatggtgttgtatgggttgttcgggctctaataaagaaactaattacataatccgtcaataaaccgcgagatgaatttattaaacctaattaatccatcattagcaaatgtttactgtagtatcacattatcaaatcatagagcaattaggcttaaaattttcgtttcacaaattagtcgtaatatgtacaattaaatttttttctaaacctatatttaaaactttatagagatgttcaaacgttcgatatgatatggtgaaaatttttaagttgagatctagacggggcctgagtcctaaccacctcgtggcggacacctgcctccgtccctgtggctccaccacttgaaagcctttgccataaaaagtaggagtcgtcctactcctacccctacccctacccctgctgcagtgctataggctagccctacctccctgctcctgtttcctctctttctctctcgcctccttcgcttcgcttccattggtggtggtctccattgctcccttcctccctgcctttttcttccataagtagtagtagtagcggaattggccgccgccgcagccatagatctgcggcgccgcgtatctcgcggctggtttggctggtgcggttagcggctagggttttggtngtttcgtctgatcgatcctccccgattttgcggcggcggtggtgaattggtgtgtgatctgataaggctggcggcggcggtggcgggggaaggggggagggggaggggagggcggcgacggggaagagggagaggatagcaatacggaggatcgacaacctggcggcgaggcaggtgaccttctcgaagcggaggagggggctgttcaagaaggccgaggagctctccatcctctgcgacgccgaggtcgggctcgtcgtcttctccgccaccggcaagctcttccaattcgccagcaccaggtatgcatgtatatacagttatacacacaccaacacatatatgcttctctcttcctcgccggcgtctccttcgctcgctcgcagttatttctgtttaatttgcttgcaattaaatctcgatctgggtgatgatctctctgtcggttcttggaatatcgtactattgttagggctctttgtcgatcgatcagggtttcttttttcttctgaaatttccctaattgatttgccggtaagttacgttcttcattttggcgtgtttaattagtataaaatttatcataataaacataaaattctagtttatcgtgcttctaattgagttgttcagttgaggagttgagattgaggtcatggctttccaatttcggattttcggtcagctcttttttcttggatatactccatatacacaacagtgatagatgtgtatattttttctcatcatcggctctttcaatcttaaaacagttttgtctttggtttatatagaattcgctagtgtgtgtactgtgtaaaattctttcaatcctacaacagttttgtctttgtcttttgctttctctgattctacaaaatgcttttgattgttcggcgctttgattcattttcttctagatgagtaatgtaatatgttcttctagggaatgttctttaattcccaggaaaaaaatgtcccagcttcttaaatagagctctctgtatatgatgttattaattatagctccatagtgcgcttaatttgaaatattgtttagcacttatgtcgtgttctcttctatctttcactcgacccattttttataatgaaaatggttaatttacaccgataggcacacggctatatatatataagcatatatagttttttttttcactcttgaagtcagcaatcttattcagttaatttaagaccgtatggaagagactcggcagagaggggtgttttctctcttttggactggatgaccagagataaatagcagattttcttgggaaaaaaaaactaaagtaggacaggttttgcatgcatgtgtgaaagcactcgtggaaaacttaccctgttctcgcatgatttgatgtgtagttgttatacatatagataaccatatctacattattgcttctggttggatcttctcataaaactgcatctttctccatctttttctacaagctcagtggacttccaagtatcttctctgctaatttcttgacactgccgttctttccacgtttgttacattattgcttttgacatcactattttaattaattagatcttgtagacaacaccctggacgcttatcaggaaacagactatatatcgttcaaagttttttgttgaaattttaactcgtaaaaaccatctggttttagttaatctcatcgatattattttcttcattaaagcaggaataagaaggcatgtagtttgtacatgcatatatatactgaaattaattattacagctttcagagatcagcagcagatttgtcatgacaattacatattcttcatgcatgagtaaatatatatatatatattcaattctgttgcttttgtcacgaatagttgttagttttaacgcgagcgtgcttaaactgaccattnnttttaagcaacttcaaaataaaaaggtttaagtccaactcattcataaattatttttttattacaaatctaatggtataactttgatgctaaatactaactagatttcttaaaaatattgttggtcaaacatagctaggcaactcaatgaaaactaacaactatttaattcaaattatttttaatggatatggtatatatcggtatacagtctaattaatttgtcaactgaacttgggttactgatggttctaaccattgtgtatacatatatgcaaacaaatttagtcctaattatatgtcgtaacatgagggtacgtactgtgttgatcgttttgtgttatgaactaatcacatggaaagaagtgcatatatatatctaatgtcaagagtgttgttaactgataccccacatatatataccagaatgtttacagtgttaattaacacatggcaaaatcaagcaaaaatacaaccaatctaaacttgttaattgttcaatctttgtattcggggtaactaattaagctagagctgtcaaacgaaacgacctctgatagtagcacacatatatgggattctccaaagtgataggtttgcgactgttaattgtttgttttttttttctccacaagcgacgacagaaaactagctagtcgatctattcttttcatgtacatcacttacactatttgccagtgcatgacatgatctatcagcatgcatggatatagagtgtgcataccaattggcctggtagctagaaaaagattgaccaatccaatcaaatggatccctgagcttacgtaccgctatcagagtttgtccaaatatattttcaattataatatataaaaatataagtagatatttaattttattaaagtactttttaaaactaatctatgttccagtgtttttttaagctaaatatttaaaattgttaaagttctagtcaaacatgataattatggaattagaaggagtacgtacataagagcaagtataataaaactcaagatcgtgcttataagactcaagtgttgtcttttaacagtgttatgttgcatttggtgatgagtgtggggtaagtgaggagagagagaacgaacaatctctcagtataaaaagcagcctctacataatttaaaaagtgcaaatactagtgtgatagtaaacaaataaataacattagagtttgtgtattatggatgagatatattgtactacctttgtctctaaatacaaaagattttgcttatgtagatatatatatgggcaaaatctcttaagatgaaggtagtacacatgttttatatatatatatacacctcctgatcgaatcgatgaggagatatgagggataaaattaaaggcggtagacatctctattattaaacttggctagcactactactagtctacatgtataaacatgaaaccattaatcacacacacagagagataaaagaaaaaaaacaagaaaacaacagaaatgactgcttaaatggagcatatatagaaaaaacataatataattattggaagatagatagatgcaaagaatattttctaaaagattggacctcaagttaaaagttctctaatatccctatgattcgagccaaccataaggaatttcataggaatttggaatgactattccttcgttccgattagacatatatatagggttttctcaactttataaaatttatttaaatttcctttgtttgaaaagagccataagatatagtactagttcatcatgtcataatacataacaagaaccataagatatagtcatgtgtcttcgtcttctagacttctactattcctgctgcctgtgccatgtcatgcatgcatggtccatgcatgaaatattgatggccacagaacaagctacgcgtggcttacctcttcacagaagcaattgtattttcttcttctcgttctctgaaacaatcaatatggtagttcagaacattcatatccttccaatatggtagttcagaagcaattgtattttgaagggcctagaagaactacctaacaatatttggtactactagcatcttgatgaaaacgtttggattcaacattacaaaccttagctagctctacaaacatccaactctgtctaactttgttttctatatatacattgatgaagcatcgaacaccaccatgg

SEQ ID NO: 84 - DNA, 1294 bp, Oryza sativa
  misc_feature (1)..(1294): AJ293816 3'-regulatory sequence engineered
  misc_feature (1)..(294): 3'-untranslated sequence
  misc_feature (295)..(1294): 3'-nontranscribed sequence
tggctggaaactaaaactgagaggaaacagctggatggcatgcctgcatcgccaaatgatcagtgcatgcactgcaagactgcaacaaataacacagttttagattgccagatgatgatgtgtgtgtgctgagagtcactggctattatcgtacacataataacaatagaacgaacaagttcttctgttcttggatgttacctgaattctactcccatacatgttgtcaatggctctgtaatcgagtgtctgcaattccagctgaaagcaaccgattacagggaaataagctattttttcttaaagttctagctagcttggtacagttcataagccgtagaaaaacaaaggcaaataggacaatatatcaaaagtcatttttaggtaaagcttttatatctccattcttaccggtttgaaagcaaagtctgcaaaataagactacgatgaatgtcaccaagggaggaaaatccacaagcgaagcatatcgcatctaactttcaggctaatctgcatgcattatacaaagagcgatttttttgggaactaatgaattgacatgcatcgtccattaaaatagaggcctgcatgctttgggcgggcaagatatgttccattgcgtcatatggattggactaaaagtgagatgtcagctttagaatcttgagctggaaacgcattatctgacagttgaatgtgcaaaggttggagcaaactcatctcgtccaccgggaagacgataaaatgcgtccagatctcgctcatgtacataaaaatttcagattgcgaaattatccccagggttaaaagttagcactagtaaagtacttttagtttagggcaatgatgcacaagcctttagcgtgcactggatcggaaaatcagtaaagctttcagttttgttgattctggctgtcagattaaacaatgcaagtagtactgagatgaaaaaaaaagttaactttagccctgcttcgattttctttggccttttcaaattttaatctttctgaagaagttagtgtaggttagcagaatggcagagcagaggaatgttctagtagagcggaaattcagtaaaaaattcagttttgttgaatgtgactatcagattaaacatgtagccatcagtactgaggtaaaaaagttagctttagcctgcttcgattttctttagcctttgcaagttttaagctactgaagaagttagggcatgcatggttagcagaacggcagagcagagcagatgaatgcaggatgatgcagaggagagccagggccgaaatgtttcaaa

SEQ ID NO: 85 - DNA, 1947 bp, Oryza sativa
  misc_feature (1)..(1947): AY115556 5'-regulatory sequence
  misc_feature (1)..(1399): 5'-nontranscribed sequence
  misc_feature (1400)..(1838): Exon
  misc_feature (1839)..(1931): Intron
  misc_feature (1932)..(1947): Exon
gatataaaaacctactttatgttcatgtcaggatgtattttcgacgaggaaacatcattttcatggacaaggtactctcttccacagaatgccttgtcaatgtattcctctcaagttcaagctgtagttttttcagtgagtacttatgccatttcctgtgggccaaaagggaaatttgccaagggtgatagagatgaaaaccttgtgagagcactaacaagtgagggatttaaaatggcagagaatcatttgggattgcaaattgttgggtaaagatgctttgtgcagcaaaagagagaggggaggagaaaaagaggggttattgacatgacaccaaatgggcatcatgttttaattaagctagcaaagctagccatctttttaacaagacaaatggtcgtaaagcaaaatggaggaggaattttgtagccattaggcacccaatttcagttttatttgtgcggccataaagccaacaaaatcacaataccaaggcgcccctggctcttatctcaattttcttttgtttcaagttctttatttcttatcttaatctaagcttcaccagaacattaggtgcaagatttattttatctccgcatttaggtaatagatttagctgatttctcgcattaagaagacctaatttgcatgcaactcctgagcctgaacatttattcaggaattgaactacattactgaccagttacccatcagatgctagcacataattaagctataaccaacttgttaacatcaaattaatcagccaatcacaatctctcaaactacacggactcaatgattgggctgctaactagttagttaaacacctggtcctggtgcacaacacaaaagagcataaatgatgtgtttctgaatccaattacacacatgatatgcaggggaccatcagaagttgcagtcatctcatctgaactgaaaccttttcagtgaacgatgctgtcatctgaaaccttggatcccaattcccagcttgtatgcatgtctgtaaatgaatatgcatcttgacctgatgagctatttgctagatgttcccatccacacgtcccgtccaatggacggaccagatcggatgatttttagccatcaggaaagcagcatgatgcacgcatggttgttatgcaaatgtgcaaatgcaaaagttggccgcaagaacagcacatacatatatactactactccagttccctagctagatatcgccaagtgtaaagctagaaatatatgcgtgcatcgtcccgacaaaaaacaaataatattctccatttccctggacagagaaagagagagagagaattctagtgtgagttgagtgagatagtgtgtggagcatctgctatataaaagggagagttgtagtgtgagttgtggtaagcaagagatagggataaggggaagaggaggaagaaggaggaggtgtagggagaaaccggagcaacctcgaagctagtccaaactagtgggaggttgtctttccggcaagccggagcccggagctatcgatcatcaagctttctaccccgaccgacgaggaagaagacgactgatcaattgatcaaaccgatctctccatagctaggtagacaggaggagaggaggaagaagagggggagaggagacttatcttgatcgatggcgcgaggcaaggtgcagctccgtcgcatcgagaacccggttcaccgtcaggtcaccttctgcaagcgccgtgccggcctgctgaagaaggccagggagctctccatcctctgcgaggccgacatcggcatcatcatcttctccgcccacgggaagctctacgacctcgccaccaccgggtaccttcagcttcttctccatcaaatcaaattaaaaaaggttttgagcttagctctgatataccatggaggttaattgatttctttgaacagaaccatggaggagctg

SEQ ID NO: 86 - DNA, 994 bp, Oryza sativa
  misc_feature (1)..(994): AY115556 3'-regulatory sequence
  misc_feature (1)..(246): 3'-untranslated sequence
  misc_feature (247)..(994): 3'-nontranscribed sequence
taacactaataatggcctgggggatacttgtgttcattactagtgtgtaatatggttaataatgcttgtgttgctgtttgctttgctattctgatgtaccttatttagacaagttcccgcaggaagtgtcttttagtattgtatttgtcttgggctgtggtgctttgtttttccctaaagaactcttgaggagctctgttgttgaaccatttcaagtaattgagactattgtttcctggaacgtttattacatttgtagaattaagcatttttttatcggatttcagtttacaagtttaagcttgcaaaatctacctaaatatctggtttcagtttgccaagtttaagctcgcaaaatctatctaaatatatggtttcagtttgccaggtttaagctcacaaaatctatgtgcaaataataactgtaaatatcaaagtgatgaggtcatgctaggaaaactattaacactgtcaaattgcgctgaaactcaatgcttatatcacctttccagcgctctccacccatattacacaaaaattaactctaacagtaagtatggtacagaaaataaaagaagacctacaaccaagatcagaaaatgaactactcgagtcctttggcaacatgtacatatgaaatgttgatgtttacacaacattgctcaggatgcagcacaatgccatgatagcaccatacatggtagtaaaagaatggaagaaaaatatatgcattttaaataccatgcaagaaatggcaattccagcgctatatcatcatacattaatggtcgaccttcattggaatcaagatcattgatgcattggaagtaactacaacgtcaaaagtttaggccctcataaccgatgatcacttaggatgcgttgagatagactaacaggagaaaaaaacaagtttgatcacattatgaagcctttattatctttaaaatagagtagtacttccgagatgcaatttaatcattcgtgcaaagtt

SEQ ID NO: 87 - DNA, 1948 bp, Oryza sativa
  misc_feature (1)..(1948): AY115556 5'-regulatory sequence engineered
gatataaaaacctactttatgttcatgtcaggatgtattttcgacgaggaaacatcattttcatggacaaggtactctcttccacagaatgccttgtcaatgtattcctctcaagttcaagctgtagttttttcagtgagtacttatgccatttcctgtgggccaaaagggaaatttgccaagggtgatagagatgaaaaccttgtgagagcactaacaagtgagggatttaaaatggcagagaatcatttgggattgcaaattgttgggtaaagatgctttgtgcagcaaaagagagaggggaggagaaaaagaggggttattgacatgacaccaaatgggcatcatgttttaattaagctagcaaagctagccatctttttaacaagacaaatggtcgtaaagcaaaatggaggaggaattttgtagccattaggcacccaatttcagttttatttgtgcggccataaagccaacaaaatcacaataccaaggcgcccctggctcttatctcaattttcttttgtttcaagttctttatttcttatcttaatctaagcttcaccagaacattaggtgcaagatttattttatctccgcatttaggtaatagatttagctgatttctcgcattaagaagacctaatttgcatgcaactcctgagcctgaacatttattcaggaattgaactacattactgaccagttacccatcagatgctagcacataattaagctataaccaacttgttaacatcaaattaatcagccaatcacaatctctcaaactacacggactcaatgattgggctgctaactagttagttaaacacctggtcctggtgcacaacacaaaagagcataaatgatgtgtttctgaatccaattacacacatgatatgcaggggaccatcagaagttgcagtcatctcatctgaactgaaaccttttcagtgaacgatgctgtcatctgaaaccttggatcccaattcccagcttgtatgcatgtctgtaaatgaatatgcatcttgacctgatgagctatttgctagatgttcccatccacacgtcccgtccaatggacggaccagatcggatgatttttagccatcaggaaagcagcatgatgcacgcatggttgttatgcaaatgtgcaaatgcaaaagttggccgcaagaacagcacatacatatatactactactccagttccctagctagatatcgccaagtgtaaagctagaaatatatgcgtgcatcgtcccgacaaaaaacaaataatattctccatttccctggacagagaaagagagagagagaattctagtgtgagttgagtgagatagtgtgtggagcatctgctatataaaagggagagttgtagtgtgagttgtggtaagcaagagatagggataaggggaagaggaggaagaaggaggaggtgtagggagaaaccggagcaacctcgaagctagtccaaactagtgggaggttgtctttccggcaagccggagcccggagctatcgatcatcaagctttctaccccgaccgacgaggaagaagacgactgatcaattgatcaaaccgatctctccatagctaggtagacaggaggagaggaggaagaagagggggagaggagacttatcttgatcgatcgcgcgaggcaaggtgcagctccgtcgcatcgagaacccggttcaccgtcaggtcaccttctgcaagcgccgtgccggcctgctgaagaaggccagggagctctccatcctctgcgaggccgacatcggcatcatcatcttctccgcccacgggaagctctacgacctcgccaccaccgggtaccttcagcttcttctccatcaaatcaaattaaaaaaggttttgagcttagctctgatatagcatggaggttaattgatttctttgaacagaaccatcgccaccatgg

SEQ ID NO: 88 - DNA, 991 bp, Oryza sativa
  misc_feature (1)..(991): AY115556 3'-regulatory sequence engineered
  misc_feature (1)..(243): 3'-untranslated sequence
  misc_feature (244)..(991): 3'-nontranscribed sequence
cactaataatggcctgggggatacttgtgttcattactagtgtgtaatatggttaataatgcttgtgttgctgtttgctttgctattctgatgtaccttatttagacaagttcccgcaggaagtgtcttttagtattgtatttgtcttgggctgtggtgctttgtttttccctaaagaactcttgaggagctctgttgttgaaccatttcaagtaattgagactattgtttcctggaacgtttattacatttgtagaattaagcatttttttatcggatttcagtttacaagtttaagcttgcaaaatctacctaaatatctggtttcagtttgccaagtttaagctcgcaaaatctatctaaatatatggtttcagtttgccaggtttaagctcacaaaatctatgtgcaaataataactgtaaatatcaaagtgatgaggtcatgctaggaaaactattaacactgtcaaattgcgctgaaactcaatgcttatatcacctttccagcgctctccacccatattacacaaaaattaactctaacagtaagtatggtacagaaaataaaagaagacctacaaccaagatcagaaaatgaactactcgagtcctttggcaacatgtacatatgaaatgttgatgtttacacaacattgctcaggatgcagcacaatgccatgatagcaccatacatggtagtaaaagaatggaagaaaaatatatgcattttaaataccatgcaagaaatggcaattccagcgctatatcatcatacattaatggtcgaccttcattggaatcaagatcattgatgcattggaagtaactacaacgtcaaaagtttaggccctcataaccgatgatcacttaggatgcgttgagatagactaacaggagaaaaaaacaagtttgatcacattatgaagcctttattatctttaaaatagagtagtacttccgagatgcaatttaatcattcgtgcaaagtt

SEQ ID NO: 89 - DNA, 2753 bp, Oryza sativa
  misc_feature (1)..(2753): AY177695 5'-regulatory sequence
  misc_feature (1)..(1799): 5'-nontranscribed sequence
  misc_feature (1800)..(2145): Exon
  misc_feature (2146)..(2737): Intron
  misc_feature (2738)..(2753): Exon
tcagtccatcatttcgtctacaactaattataagccataatgctcattagcaacaaaaaaaattatagtaaaacttttacatatgtgttcttgacgacttaaaagtcaatattgaaaataaactgtgttgaataaacattaaaatcaattctaaaattaagttttaaaatatttaaattttggttgcagcaaagctgaagagcaaaccatggagctaacaaacacatgtataattgactggttgccaatttacattttccgcctcctaataagctagcatttaatattgtagcacccacagatagtcatccggaaagcagtaaaccagaaaccagacacattttgtgggatggtggcaaaatgtgtataaaaccaacgggaagcacatagctagcacacgaatttaggtacctataacctgccctcctcatatcatgtcatatgcgagataccaccaaatagaaaaataaaatgtgtatttacatttctcgcttactaagctagcatattattaagagaaaattgtgtgcccctgagtttttactcatccctttcatgccctttagtttttgttttcaatcacctttatagccattccttagactacatataacagtcaacttaaaaagcctaagtcttgtgttgaaagcaatttcaactcaaaaattaacatcgaaagggatagaattatttgacacccaaattaatttgaaaacaaaaattcaaattttgaaattaattctagttatgtttgatgaagttttcaatgataatttcacttgtatctcttcatagaaatttgttcaaatttgtttgaagttgattttaaattaaaatacaaattttagtttaagatagaaacagtgatgatatgtgtcattttcccttttgtaatttcatcaaattttattgcaattcatttaaaaaatttaaattttattgttcaaattcggggtcactcaactttctccctttaagttttataactaaagattttcttctagatatattatgttcttatctatgagtgagagacaatataatcattagaaaagctcaattgagatgaactaacaaaatgagtatatacagaaaagctcaaaagaaaacttagggctatgtaagggataagacaaaactcaaaagcatggaagagatagagcgagaactgcaaaggaaagacaaagatttttctctatttaataatagagcgcacacagtttatcattcggaaagcagtaaaccggaaaccagccacactttgcgggatggtggcgaaacgtgtcctaaaccaataggagggacatcaccagcacacaaattaaggtatctataacctgccctcctcgtaccatatcatatgcgagataccgccaaatagctttagataatagaatagcttaataaaacaatgtacttgttgcagaagtcgaggaaaataatactgttggttctcacattatagtaatgctctctctacttaatttatcaagtgtgctgtcagggatgacaacaccatggcaccatcagtcatcaggacagcccaccacctttgcaaatagagagaaaacggtacaatgacaggtataaacaaagaacggatagcttgccgatgttaccatttagacttctggccaactaaattatacttcactaattaagctctaataagaagccctggctgcttaaaccagcagcagctaccttagacatctattttggagcaatagatccgccatacatatattaattatctactcgatctctccattagtctccagctatacgcatcttccctagcttgctaagctagctagtcttctccttcctttctcctcttcctcctcctcctcttcttctcaatcttgctcagcaaatcttgtcggggagagagagagagagatcagcaaggagaagagggaattaagctagatcgaggtagtcgtcgatcgatcgattgaagatggggagagggaagattgccatcaagaggatcgacaacacgatgaaccggcaggtgaccttctcgaagcggcgcggcgggctgatgaagaaggcccgggagctggccatcctctgcgacgccgacgtcggcctcattgtcttctcctgcaccggccgcctctacgacttctccagctcaaggttggtgattatcatcgtcgatccccttctatagttctatatgtatatagctgctacctgctaggtcatgaaatatatcccaatccttcagatttttgtctatatatctcgatgtgtccagctatctagcttttgctttactctagcttagggttttctttgattctttggatgatcttaaggtgaaagacttctgttttttttagaaaaaaataaagaaaatcgatgcatccatttagatcactccttctcccatctaaataatctctatacactattaatttgatgaattgtgtatgcatatattgactctttctgtttagtctggagcattattcctgaaagagaaggagatgcgcagtaggagctggtatgcaaggggctgccagaatgtgagaatatatttctagaaatggtgtatacgatttttctaagttaaataactcacaagttatctctagatatatatttattttgatttgtatattaatttacctcgtttcttagctgaaaatttaggttaatttcccctagatgcataaaacatttgctatatattggatcgtaatggtatagtcttcctttttgttagcatgaaatcaataata

SEQ ID NO: 90 - DNA, 1340 bp, Oryza sativa
  misc_feature (1)..(1340): AY177695 3'-regulatory sequence
  misc_feature (1)..(26): 3'-untranslated sequence
  misc_feature (27)..(582): Intron
  misc_feature (583)..(818): Exon
  misc_feature (819)..(1340): 3'-nontranscribed sequence
taacacatgatcaagtgttaaaaacagtgagttttcaaatctttaattacgtaaaccgtaaaacctcgctcttgtaactaatatatatttcttcaatgtttaatcaaagttgtcagagttccttaccttttgctagtatcacaaaacaagtagctatttgtttgtgatactagctagtaatttgtgttaagctagctagtaacttgtgttaaactagctatataaattaagtcacaaaatacccataaattaagctagctagcccttcaaattttgttgtttttctctgattagttaatactatggtttctagctagctagctagctagcccttcaaattaagcactgtacagaacttgttaattttctactcatctttactagtataaattatgccactaattaagttcctagagttacttttcatgttcagaagttgcatgcatgcatggcaagttactttaattactgtgctcttgtttaaagaaaagtgttaactttattctaaaaaaaaagtgttaactttacagttacacagatatgtccctcattagaaggtgtaataaatctgtttgtttgcagacatgatggccagtaacttttgcagcatcacgcctactacaagcgcaagaaaagctagctactactggaacaagggatcttaatcatgttttgaaacttaattagtaatattttaaaaaatcgtactatactaatcatgatgtgtagcgtattgcaccactgaatttattactgtaattaacatggtgagtgttaaaatattttgtgatatccatattatattgcaactcttacgtgtcatatatgtcatgttatatttaaacattatgtgcaaagagatcaccctcaataatgttctatggtatgtacatatatattcatatatgtatataaacaagatgatatccactccacacctccctccccctccctcacggccgctacagcatggtgtcgtaaactgtgtggctgcaaagatagctgtgacgaggccttcccttccttcccacatgctcccagaggcatatttcaaggcaatgaaggttgcgactacactgaggtggccagatgggcagagccacagaggtccgtacatttcatcaagcaaaagccagtttcatttaaaaaatccgtttgaagagaagagaggtgaagaaaagcgcatttataaagtggtgtggcaagaacttcggaggtaattaccattaaagtggagtcgcatgagataccaatgcctactggagatgaaactaaggtggccaaggcgagaagaccgcagttggagccaacgcagctcaccacgctggtttgaccgagcc

SEQ ID NO: 91 - DNA, 2754 bp, Oryza sativa
  misc_feature (1)..(2754): AY177695 5'-regulatory sequence engineered
tcagtccatcatttcgtctacaactaattataagccataatgctcattagcaacaaaaaaaattatagtaaaacttttacatatgtgttcttgacgacttaaaagtcaatattgaaaataaactgtgttgaataaacattaaaatcaattctaaaattaagttttaaaatatttaaattttggttgcagcaaagctgaagagcaaaccatcgagctaacaaacacatgtataattgactggttgccaatttacattttccgcctcctaataagctagcatttaatattgtagcacccacagatagtcatccggaaagcagtaaaccagaaaccagacacattttgtgggatggtggcaaaatgtgtataaaaccaacgggaagcacatagctagcacacgaatttaggtacctataacctgccctcctcatatcatgtcatatgcgagataccaccaaatagaaaaataaaatgtgtatttacatttctcgcttactaagctagcatattattaagagaaaattgtgtgcccctgagtttttactcatccctttcatgccctttagtttttgttttcaatcacctttatagccattccttagactacatataacagtcaacttaaaaagcctaagtcttgtgttgaaagcaatttcaactcaaaaattaacatcgaaagggatagaattatttgacacccaaattaatttgaaaacaaaaattcaaattttgaaattaattctagttatgtttgatgaagttttcaatgataatttcacttgtatctcttcatagaaatttgttcaaatttgtttgaagttgattttaaattaaaatacaaattttagtttaagatagaaacagtgatgatatgtgtcattttcccttttgtaatttcatcaaattttattgcaattcatttaaaaaatttaaattttattgttcaaattcggggtcactcaactttctccctttaagttttataactaaagattttcttctagatatattatgttcttatctatgagtgagagacaatataatcattagaaaagctcaattgagatgaactaacaaaatgagtatatacagaaaagctcaaaagaaaacttagggctatgtaagggataagacaaaactcaaaagcatggaagagatagagcgagaactgcaaaggaaagacaaagatttttctctatttaataatagagcgcacacagtttatcattcggaaagcagtaaaccggaaaccagccacactttgcgggatggtggcgaaacgtgtcctaaaccaataggagggacatcaccagcacacaaattaaggtatctataacctgccctcctcgtaccatatcatatgcgagataccgccaaatagctttagataatagaatagcttaataaaacaatgtacttgttgcagaagtcgaggaaaataatactgttggttctcacattatagtaatgctctctctacttaatttatcaagtgtgctgtcagggatgacaacacgatggcaccatcagtcatcaggacagcccaccacctttgcaaatagagagaaaacggtacaatgacaggtataaacaaagaacggatagcttgccgatgttaccatttagacttctggccaactaaattatacttcactaattaagctctaataagaagccctggctgcttaaaccagcagcagctaccttagacatctattttggagcaatagatccgccatacatatattaattatctactcgatctctccattagtctccagctatacgcatcttccctagcttgctaagctagctagtcttctccttcctttctcctcttcctcctcctcctcttcttctcaatcttgctcagcaaatcttgtcggggagagagagagagagatcagcaaggagaagagggaattaagctagatcgaggtagtcgtcgatcgatcgattgaagaaggggagagggaagattgccatcaagaggatcgacaacacgaagaaccggcaggtgaccttctcgaagcggcgcggcgggctgatcaagaaggcccgggagctggccatcctctgcgacgccgacgtcggcctcattgtcttctcctgcaccggccgcctctacgacttctccagctcaaggttggtgattatcatcgtcgatccccttctatagttctatatgtatatagctgctacctgctaggtcatgaaatatatcccaatccttcagatttttgtctatatatctcgatgtgtccagctatctagcttttgctttactctagcttagggttttctttgattctttggatgatcttaaggtgaaagacttctgttttttttagaaaaaaataaagaaaatcgatgcatccatttagatcactccttctcccatctaaataatctctatacactattaatttgatgaattgtgtatgcatatattgactctttctgtttagtctggagcattattcctgaaagagaaggagatgcgcagtaggagctggtatgcaaggggctgccagaatgtgagaatatatttctagaaatggtgtatacgatttttctaagttaaataactcacaagttatctctagatatatatttattttgatttgtatattaatttacctcgtttcttagctgaaaatttaggttaatttcccctagatgcataaaacatttgctatatattggatcgtaatggtatagtcttcctttttgttagcatcaaatccaccatgg

SEQ ID NO: 92 - DNA, 1337 bp, Oryza sativa
  misc_feature (1)..(1337): AY177695 3'-regulatory sequence
  misc_feature (1)..(23): 3'-untranslated sequence
  misc_feature (24)..(579): Intron
  misc_feature (580)..(815): Exon
  misc_feature (816)..(1337): 3'-nontranscribed sequence
cacatgatcaagtgttaaaaacagtgagttttcaaatctttaattacgtaaaccgtaaaacctcgctcttgtaactaatatatatttcttcaatgtttaatcaaagttgtcagagttccttaccttttgctagtatcacaaaacaagtagctatttgtttgtgatactagctagtaatttgtgttaagctagctagtaacttgtgttaaactagctatataaattaagtcacaaaatacccataaattaagctagctagcccttcaaattttgttgtttttctctgattagttaatactatggtttctagctagctagctagctagcccttcaaattaagcactgtacagaacttgttaattttctactcatctttactagtataaattatgccactaattaagttcctagagttacttttcatgttcagaagttgcatgcatgcatggcaagttactttaattactgtgctcttgtttaaagaaaagtgttaactttattctaaaaaaaaagtgttaactttacagttacacagatatgtccctcattagaaggtgtaataaatctgtttgtttgcagacatgatggccagtaacttttgcagcatcacgcctactacaagcgcaagaaaagctagctactactggaacaagggatcttaatcatgttttgaaacttaattagtaatattttaaaaaatcgtactatactaatcatgatgtgtagcgtattgcaccactgaatttattactgtaattaacatggtgagtgttaaaatattttgtgatatccatattatattgcaactcttacgtgtcatatatgtcatgttatatttaaacattatgtgcaaagagatcaccctcaataatgttctatggtatgtacatatatattcatatatgtatataaacaagatgatatccactccacacctccctccccctccctcacggccgctacagcatggtgtcgtaaactgtgtggctgcaaagatagctgtgacgaggccttcccttccttcccacatgctcccagaggcatatttcaaggcaatgaaggttgcgactacactgaggtggccagatgggcagagccacagaggtccgtacatttcatcaagcaaaagccagtttcatttaaaaaatccgtttgaagagaagagaggtgaagaaaagcgcatttataaagtggtgtggcaagaacttcggaggtaattaccattaaagtggagtcgcatgagataccaatgcctactggagatgaaactaaggtggccaaggcgagaagaccgcagttggagccaacgcagctcaccacgctggtttgaccgagcc

SEQ ID NO: 93 - DNA, 2519 bp, Oryza sativa
  misc_feature (1)..(2519): AY177696 5'-regulatory sequence
  misc_feature (1)..(1450): 5'-nontranscribed sequence
  misc_feature (1451)..(1632): Exon
  misc_feature (1633)..(2504): Intron
  misc_feature (2505)..(2519): Exon
caagcaaagaaacaaatttcgcaattagggtttttaagagataattttcccgctaggcgccacgacggaacgggcgctacagggtgtgttccttctccaaatatgcccttaatgttcagttttatttggcaactaattaaaccaagcatatatatactacctccggccagttttatttgtggttttggacaaactatattgataaagaatatgttgatagtactttatgcttgcctatggacaagtatttgtggtagtcaaaagtatgacattggaatacctcgctcaccgttgaacacaaccgtgagttagctgaccagactcatccgtgacccacacaaactataggttccatgaattaattccgatgccctttgccatctgcatacgcttcctactttatcttaaagaaattccatagtttaccaataggctctcttacttgaaaaaataggtcttttttttcgatttctattgagtagaggtttttctttttgttttctttttctggatttgtatgccatgcattctcccactgttctttttagtatcgttgatgattaatctccaaaaatatatcttttaccattattttctaatcatttgtttgtaggagttactaaaagtttactaatatcattctcatatatacatcaaatcttaattaaatgaatgaatttctatattgtcgatttaagtttttgatatctgattatgtgaatgccaaaatgacatctactaaaatctcaaacattggtgaggatgagacatcatctagtacaacgaatctggataaatagctagctcatgtctcatcctcactaaggttgttttttttgggacaaatggagtatttgtgaacgaaagaaggccaagcatgcacttaatcaccacctttcgtgcgtgcaacgatttttctcttggctctagctaacctaagccgggacacttttaacaggccttttaaatggcatccagccataaattaaactaatcgccaatatcaggcagcagccaattgggcgctgtctcctctttcctctcttccccctcccccttgcgtttcattgctaaataaagcaagtcgctggcaatttgaggaaagtccacccataccctgcaagttgcatccaccaccagaaaaagcctctcccgcaaacgccacacaccaaaccacaattaatcccatcaaattcccctataagctttggcctctttgcagctttcttctaccagctcccagctagatcccctcttgccttctttggcacattcgttcttgctctctgctgtggattatttgcctccggctccggccaatcggcggcgtggcgcgggcagatcgatcgatctcatcggcggcggggattgcctgttctagctatagcttgatagcttagctagcttggtcatttctggtgagagatcgatcgagatagcggcgaagaagatggggagggggaagattgtgatccgccggatcgacaactcgacgagccggcaggtgacgttctcgaagcggaggaacgggatcttcaagaaggccaaggagctggccatcctctgcgacgccgaggtcggcctcatgatcttctccagcaccggccgcctctacgagtactccagcaccaggtctgttctgttcttcatatcatcgatcatccgtcctctctccttgcttgcttgttgcttgttgatgattaacttttgcttgaagataatatttgttattgattcttgttcttttcctgcgcttagctttttctgctttaatttcctagtattttgatatttagccagggagccagcatgggccatggccagctcttctctgtgcagtcagaaagatgcataaactatgcaaaaactgccctcttattgagaaaagaaataaactatgcaaaaaccgtatatagacattcatgcacctaactaaaaaatggttatcacatatatataagagctgcacggagtaatgattatatatgtttttgtctttatttttcttttgaaggagatctgtatgtgtagttcttctatctaatttatcttttgttttgcatatgtatattttttttcttccttgttcttgactactaattaattaattaattgcaaaactaaacattgtctttggtttgtattaatttgtatattacttggccgtacgttatcatgtgatcaacatatatgcattgcagaaaccatcaaatgaaagaatatgtggtgaatggcagctaaaaaaatgatctagggtttcgtgataatatgaagtgtatagtgtgtgtctctaaatgaaaatttgtattacttcgatctctcagctgtgaataattgcgtgggtctatacatctcaactaccaattaggaggtgtgttagatggatgcttatttcttggtcaaaaaataacacataaaaatcacatgattcacatatatgatgtgtaatcttaattaacagattaaattttgttacttaccgttatatatatgcaaatatgcagcatgaagtcagttat

SEQ ID NO: 94 - DNA, 763 bp, Oryza sativa
  misc_feature (1)..(763): AY177696 3'-regulatory sequence
  misc_feature (1)..(265): 3'-untranslated sequence
  misc_feature (266)..(763): 3'-nontranscribed sequence
tgaccagaaaaacattgttttgctacacccttgtatgctgaagggatactatttgctgtcaagagttgatactcagatcaagaaaaaaaaaactattcatgccatagtgattgagaaatggacttgtatactggaaataaatgccacagtggaattgagttgtggaatccaggcaatgagtgttttatgattcaatttttccatgtatttttcatatattaaccagtgcgggcttgtgtaaaaaatataaccaggcaaggaaaattagctgtattgtgcatatggagcaaatttcaggcgttactaccattaaaatcatgacatgctgtaagcaaatatcttgtagacctttatctacatagatttttttcagtaggggcctccctaccgtttcaaaagaaaaagaatgcagatgattgatatttcgaatgccttcagacatggataattcataactattgcgatgtggaaccttcttaattttcaatttttaacacgctatctacaagtggaatatcataatcatttgcttgtcttcattagtaagacaagtttgaatgcacgtgccaatgtgagacaaccgtaccatataacggccattagtgctagattggctttgcaccatgaaaacattggttttacaacctactgtgaggacattaaaagcagagatactctagctggcctgtttggagataaacagtcgagaaatattgtgaagacaatcaaagtgtttattcctgggatgcagtccaatcccaaa

SEQ ID NO: 95 - DNA, 2520 bp, Oryza sativa
  misc_feature (1)..(2520): AY177696 5'-regulatory sequence engineered
caagcaaagaaacaaatttcgcaattagggtttttaagagataattttcccgctaggcgccacgacggaacgggcgctacagggtgtgttccttctccaaatatgcccttaatgttcagttttatttggcaactaattaaaccaagcatatatatactacctccggccagttttatttgtggttttggacaaactatattgataaagaatatgttgatagtactttatgcttgcctatggacaagtatttgtggtagtcaaaagtatgacattggaatacctcgctcaccgttgaacacaaccgtgagttagctgaccagactcatccgtgacccacacaaactataggttccatgaattaattccgatgccctttgccatctgcatacgcttcctactttatcttaaagaaattccatagtttaccaataggctctcttacttgaaaaaataggtcttttttttcgatttctattgagtagaggtttttctttttgttttctttttctggatttgtatgccatgcattctcccactgttctttttagtatcgttgatgattaatctccaaaaatatatcttttaccattattttctaatcatttgtttgtaggagttactaaaagtttactaatatcattctcatatatacatcaaatcttaattaaatgaatgaatttctatattgtcgatttaagtttttgatatctgattatgtgaatgccaaaatgacatctactaaaatctcaaacattggtgaggatgagacatcatctagtacaacgaatctggataaatagctagctcatgtctcatcctcactaaggttgttttttttgggacaaatggagtatttgtgaacgaaagaaggccaagcatgcacttaatcaccacctttcgtgcgtgcaacgatttttctcttggctctagctaacctaagccgggacacttttaacaggccttttaaatggcatccagccataaattaaactaatcgccaatatcaggcagcagccaattgggcgctgtctcctctttcctctcttccccctcccccttgcgtttcattgctaaataaagcaagtcgctggcaatttgaggaaagtccacccataccctgcaagttgcatccaccaccagaaaaagcctctcccgcaaacgccacacaccaaaccacaattaatcccatcaaattcccctataagctttggcctctttgcagctttcttctaccagctcccagctagatcccctcttgccttctttggcacattcgttcttgctctctgctgtggattatttgcctccggctccggccaatcggcggcgtggcgcgggcagatcgatcgatctcatcggcggcggggattgcctgttctagctatagcttgatagcttagctagcttggtcatttctggtgagagatcgatcgagatagcggcgaagaagatcgggagggggaagattgtgatccgccggatcgacaactcgacgagccggcaggtgacgttctcgaagcggaggaacgggatcttcaagaaggccaaggagctggccatcctctgcgacgccgaggtcggcctcaagatcttctccagcaccggccgcctctacgagtactccagcaccaggtctgttctgttcttcatatcatcgatcatccgtcctctctccttgcttgcttgttgcttgttgatgattaacttttgcttgaagataatatttgttattgattcttgttcttttcctgcgcttagctttttctgctttaatttcctagtattttgatatttagccagggagccagcatgggccatcgccagctcttctctgtgcagtcagaaagatgcataaactatgcaaaaactgccctcttattgagaaaagaaataaactatgcaaaaaccgtatatagacattcatgcacctaactaaaaaatggttatcacatatatataagagctgcacggagtaatgattatatatgtttttgtctttatttttcttttgaaggagatctgtatgtgtagttcttctatctaatttatcttttgttttgcatatgtatattttttttcttccttgttcttgactactaattaattaattaattgcaaaactaaacattgtctttggtttgtattaatttgtatattacttggccgtacgttatcatgtgatcaacatatatgcattgcagaaaccatcaaatgaaagaatatgtggtgaatggcagctaaaaaaatgatctagggtttcgtgataatatgaagtgtatagtgtgtgtctctaaatgaaaatttgtattacttcgatctctcagctgtgaataattgcgtgggtctatacatctcaactaccaattaggaggtgtgttagatggatgcttatttcttggtcaaaaaataacacataaaaatcacatgattcacatatatgatgtgtaatcttaattaacagattaaattttgttacttaccgttatatatatgcaaatatgcagcatcaagccaccatgg

SEQ ID NO: 96 - DNA, 761 bp, Oryza sativa
  misc_feature (1)..(761): AY177696 3'-regulatory sequence engineered
  misc_feature (1)..(265): 3'-untranslated sequence
  misc_feature (266)..(761): 3'-nontranscribed sequence
cccagaaaaacattgttttgctacacccttgtatgctgaagggatactatttgctgtcaagagttgatactcagatcaagaaaaaaaaaactattcatgccatagtgattgagaaatggacttgtatactggaaataaatgccacagtggaattgagttgtggaatccaggcaatgagtgttttatgattcaatttttccatgtatttttcatatattaaccagtgcgggcttgtgtaaaaaatataaccaggcaaggaaaattagctgtattgtgcatatggagcaaatttcaggcgttactaccattaaaatcatgacatgctgtaagcaaatatcttgtagacctttatctacatagatttttttcagtaggggcctccctaccgtttcaaaagaaaaagaatgcagatgattgatatttcgaatgccttcagacatggataattcataactattgcgatgtggaaccttcttaattttcaatttttaacacgctatctacaagtggaatatcataatcatttgcttgtcttcattagtaagacaagtttgaatgcacgtgccaatgtgagacaaccgtaccatataacggccattagtgctagattggctttgcaccatgaaaacattggttttacaacctactgtgaggacattaaaagcagagatactctagctggcctgtttggagataaacagtcgagaaatattgtgaagacaatcaaagtgtttattcctgggatgcagtccaatcccaaa

SEQ ID NO: 97 - DNA, 2040 bp, Oryza sativa
  misc_feature (1)..(2040): AY177698 5'-regulatory sequence
  misc_feature (1)..(1466): 5'-nontranscribed sequence
  misc_feature (1467)..(1654): Exon
  misc_feature (1655)..(2023): Intron
  misc_feature (2024)..(2040): Exon
aagatttgaactactgccttgtcttccatgtttcatagagtcatgaacctatttaaatgttgaatttgggaagagtatgtcaaaatggactgcctgaagtggtaacctgtaactactgcaacattcaggcaagtggcacacaatttgttttgacaaagaatttgtatgcataaaacactaacacagcacataactactatattccttactaggtgtgaacatggctgaagtctcttagaaaaacaaaaacagataatgacacaccaggcaaatatgtatgagccttggcctcctatgcctcaactgcctcctgataaggagagcataatctccttaccatataagtcactatgatggttcccgaactccattggaagtactccatttaagagaagttctgttttcaccttgttctgctggctcctcatcatgacttatgaatataaattcacaagtgtccttctgatttttttttttttgaaacttaagaaacaccttgagactttttttttcttgtgaattgcaatgaatgagcaccaaaaatctgaaaaaaacctatccagagaaaactctgattgttcatcacttattattttctttgagaccagaactggtaagctctgggacttacattggtacaaagtgaagatatgtacatgtggcatagtatgtcatatatattgactatgacatccagcaggttaggtgtgtagggtggaccagaagctgccttactgaaaacattattgcttctagttattctctgtcttggtcaattctagcttggccttcttataggagaaacctggctgcaagcctgcaagctcatcacttgctatgctcaggggcagttacctgtccacagcaaggctgtttcaagcctccagcattatcttctccagttttttggtgccatctcaaaatacacacaaacccacacataaactccatcagcatgtatataagtgctaatttaaggacatactgttgtatgcactagttcacatgatagatatctggaacgtataaggtagtttaaagtctgtgtgcaaatacattttgttaaattgcataagttttataggaagttaatttagctaaatggctttatttgcgagttcgatcatattatggtgtgttatgttccttgctgcaatatatagtgggacaacctgacaagagatcatcactggtactggtcttttaagactgacataagaatttagcaggcatataaaggtgccctgagcccctgaaaactctctctctctctctctctctctctctctctctctcgtttcctgaatctgaggccatttgtttggtacatttctcatcatgcatttgaaatcatttctttgattttggtcttgcttgagcttttgtttcatgatccatgactagtacattttgaagaacactttctttgcaggctgaacaggaggaaagaagcaccaacctgatcaatggggcgtgggagagtagagctcaaaaagattgaaaatccgacaaaccgccaagttaccttctccaagaggaggatggggctgctcaagaaagcaaatgagctggccattctttgtgatgcacaaattggggtgattgtgttctcaggcactggcaagatgtacgagtactccagccccccttggaggtatgcataaagttttttgtttcaagtattgtctgtcctttgcatttggttttgttttgaggcgaaatagaaatttcagacatcgttcataatacttcttgttaaatttcttcggtttcttcgatcagttctgctctattctacaacttttctatgatttttggaacttgtgttggaaaaaattgttgataatatgcaatgtttcatcatcatattttgaactgaattattagtgatgaactcaagggaatttacaactgattttatacaagtttctgccacctacagccatttcaacttagcttaaccatgtgaaattctcgaagagaaaccgatgatcaaatacataaagtcttttccttttggcaggattgcaaatatctttg

SEQ ID NO: 98 - DNA, 1029 bp, Oryza sativa
  misc_feature (1)..(2040): AY177698 3'-regulatory sequence
  misc_feature (1)..(27): 3'-untranslated sequence
  misc_feature (28)..(2040): 3'-nontranscribed sequence
tgattgccctctttccatcccaataggagatgcaaattccaggagatcagagcaactatctgtgccacatggtaagccatgctctaagctttctcctcaagtgaaattatgttgcggatttctgtattcgcgtaacttgtttgcgcctgtcaaaagaacctgattggcgagcaggctcaggcacctctgatggtgaatccagaagccgttcccgctgtgggatgtgggtggcagcagccagatgtacaatcaggatgctgagtcattccatgacagcgctgcagctttcacctcagcttgagtacaagcttaagccgctgcagcccaacctgcaggaggaggccaacctccatggctacgttcttcggctgtggtaagtcgctctctgcctcgtctttggctgctcgtttgatccatggacaagatcatcagtagtttgaagtgccataactttgcggttgtcatcatatgacagaattaaaatcctgtaaactcatcatgtgctgtaaattgtggttacctggaacttttttttttttgccgggtcgacaaagaagccgaccgaagtatattaagtattacctggaacattttgatcagtcatgaaacagaatgatctccaagaaactttatacattgacaaattgagttgttatctgcagattcctaaggacaccatggagtctggatgcaactgagcaaccaattgaggataatgagcttgtctgcctgaatctgctccagaactctagtctaaccagctgagaaataaactatatatacgcttcctgtgttattgaactgtttggctatgttgcatgtaaagtaatgataagtatggctttcttgtgtgttttcaagaactaatggctactattaaggtgtgtaacggttatgtacaacatatatgatgaccgtacatggtgagaatgcgtcttatttgagattgagccatattatgccggggatttccttatagcaaataaatcagtaaatcataaatctgaacaatatttcttttaggttaac

SEQ ID NO: 99 - DNA, 2041 bp, Oryza sativa
  misc_feature (1)..(2041): AY177698 5'-regulatory sequence engineered
aagatttgaactactgccttgtcttccatgtttcatagagtcatgaacctatttaaatgttgaatttgggaagagtatgtcaaaatggactgcctgaagtggtaacctgtaactactgcaacattcaggcaagtggcacacaatttgttttgacaaagaatttgtatgcataaaacactaacacagcacataactactatattccttactaggtgtgaacatggctgaagtctcttagaaaaacaaaaacagataatgacacaccaggcaaatatgtatgagccttggcctcctatgcctcaactgcctcctgataaggagagcataatctccttaccatataagtcactatgatggttcccgaactccattggaagtactccatttaagagaagttctgttttcaccttgttctgctggctcctcatcatgacttatgaatataaattcacaagtgtccttctgatttttttttttttgaaacttaagaaacaccttgagactttttttttcttgtgaattgcaatgaatgagcaccaaaaatctgaaaaaaacctatccagagaaaactctgattgttcatcacttattattttctttgagaccagaactggtaagctctgggacttacattggtacaaagtgaagatatgtacatgtggcatagtatgtcatatatattgactatgacatccagcaggttaggtgtgtagggtggaccagaagctgccttactgaaaacattattgcttctagttattctctgtcttggtcaattctagcttggccttcttataggagaaacctggctgcaagcctgcaagctcatcacttgctatgctcaggggcagttacctgtccacagcaaggctgtttcaagcctccagcattatcttctccagttttttggtgccatctcaaaatacacacaaacccacacataaactccatcagcatgtatataagtgctaatttaaggacatactgttgtatgcactagttcacatgatagatatctggaacgtataaggtagtttaaagtctgtgtgcaaatacattttgttaaattgcataagttttataggaagttaatttagctaaatggctttatttgcgagttcgatcatattatggtgtgttatgttccttgctgcaatatatagtgggacaacctgacaagagatcatcactggtactggtcttttaagactgacataagaatttagcaggcatataaaggtgccctgagcccctgaaaactctctctctctctctctctctctctctctctctctcgtttcctgaatctgaggccatttgtttggtacatttctcatcatgcatttgaaatcatttctttgattttggtcttgcttgagcttttgtttcatgatccatgactagtacattttgaagaacactttctttgcaggctgaacaggaggaaagaagcaccaacctgatcaaaggggcgtgggagagtagagctcaaaaagattgaaaatccgacaaaccgccaagttaccttctccaagaggaggatcgggctgctcaagaaagcaaatgagctggccattctttgtgatgcacaaattggggtgattgtgttctcaggcactggcaagaagtacgagtactccagccccccttggaggtatgcataaagttttttgtttcaagtattgtctgtcctttgcatttggttttgttttgaggcgaaatagaaatttcagacatcgttcataatacttcttgttaaatttcttcggtttcttcgatcagttctgctctattctacaacttttctatgatttttggaacttgtgttggaaaaaattgttgataatatgcaatgtttcatcatcatattttgaactgaattattagtgatgaactcaagggaatttacaactgattttatacaagtttctgccacctacagccatttcaacttagcttaaccatgtgaaattctcgaagagaaaccgatgatcaaatacataaagtcttttccttttggcaggattgcaaaccaccatgg

SEQ ID NO: 100 - DNA, 1025 bp, Oryza sativa
  misc_feature (1)..(1025): AY177698 3'-regulatory sequence engineered
  misc_feature (25)..(1025): 3'-nontranscribed sequence
ttgccctctttccatcccaataggagatgcaaattccaggagatcagagcaactatctgtgccacatggtaagccatgctctaagctttctcctcaagtgaaattatgttgcggatttctgtattcgcgtaacttgtttgcgcctgtcaaaagaacctgattggcgagcaggctcaggcacctctgatggtgaatccagaagccgttcccgctgtgggatgtgggtggcagcagccagatgtacaatcaggatgctgagtcattccatgacagcgctgcagctttcacctcagcttgagtacaagcttaagccgctgcagcccaacctgcaggaggaggccaacctgcatggctacgttcttcggctgtggtaagtcgctctctgcctcgtctttggctgctcgtttgatccaaggacaagatcatcagtagtttgaagtgccataactttgcggttgtcatcatatgacagaattaaaatcctgtaaactcatcatgtgctgtaaattgtggttacctggaacttttttttttttgccgggtcgacaaagaagccgaccgaagtatattaagtattacctggaacattttgatcagtcatgaaacagaatgatctccaagaaactttatacattgacaaattgagttgttatctgcagattcctaaggacacgatggagtctggatgcaactgagcaaccaattgaggataatgagcttgtctgcctgaatctgctccagaactctagtctaaccagctgagaaataaactatatatacgcttcctgtgttattgaactgtttggctatgttgcatgtaaagtaatgataagtatggctttcttgtgtgttttcaagaactaatggctactattaaggtgtgtaacggttatgtacaacatatatgatgaccgtacatggtgagaatgcgtcttatttgagattgagccatattatgccggggatttccttatagcaaataaatcagtaaatcataaatctgaacaatatttcttttaggttaa

SEQ ID NO: 101 - DNA, 2012 bp, Oryza sativa
  misc_feature (1)..(2012): AY177699 5'-regulatory sequence
  misc_feature (1)..(1566): 5'-nontranscribed sequence
  misc_feature (1567)..(1881): Exon
  misc_feature (1882)..(1998): Intron
  misc_feature (1999)..(2012): Exon
tccggtcggccctcgtcctccccgtcctctcggcgccggcggtagagaagagagaaaggcggggagatcagcggtggagaagagagaaaggtggggagtgaagagataaaggtgggaaattttgttagagtggtgatacatatgtggtagttgtaaaaattagtaaaatatagtatgtaatatggatgatctgttggagtgaaaagtaatatagagtaggaatctttttggatgactatctaaataagagtatagaagatggaatttagatgagctgttgaggatgctcttatcaattttgcacccaggtgtgctcaattattcaccccctcagacctaccgaaacggagtatagcaaatagtatacgactatacttaatactgagtgtgcttaggaactgaaaaacgtatttatgttctatgtgaaaatgtaacggtctacacgtacagtggcatagctctgtttagttaccaaaataaaaattttcacgttgtcacatcgaatgtttggacacatgcatatagtattaaatttagaaaaaaaaaccaattacatagattgcgtgtaaaattgcaagatgaattttttacgcttacttgcgccatgatttgaaaatgtggtactacagtaaatatttgttaatgatggattaattaggcttaataaattcatctcgcagttttctggcgaaatccgtaatctggcgaaatccgtaatttattttattattagactaaatttaatattttaaatgtgtgtccgtatgtttgatgtgacaaacaaacttaaaattttcctcaattaaaacttttggatgtcacatcagacgtttgatcggatgttgaaaggggttttcggacacgaataaaaaaagtaatttcataactcgcctggaaaccgcgagacgaatcttttgagcctaattaagctgtcattagcacatatgggttactgtagcacttatggctaatcatggactaattatgctcaaaagattcgtctcacgatttacatgcaaaccgtgcatttagtttttttttatctatttttaatgcttcatacatgtatccaaaaattcgatgtgatgtttttgtgaaaagtttttgaaaactaaacggtgcctaaacaaggccatactgggatggctcttcagcgcgcttgaggggctttgagccgatagatagtttcgaaaccaacaaaatgcagtagaagtactctcgagctatagtcgcgacgtgctgccccgcaggagtacagtagtagtacaacgtaagcgggagcaacagactccccccctgcaacccactgtgcctgtgccctcgacgcgtctccgtcgctttggcaaatgtcacgtacatattaccgtctcaggctctcagccatgctccctaccacccctgcagcgaagcaaaagccacgcacgcggcgcctgacatgtaacaggactagaccatcttgttcatttcccgcaccccctcctctcctcttcctccatctgcctctttaaaacagtaaaaataaccgtgcatcccctgggcaaaatctctcccatacatacactacagcggcgaacctttccttattctcgcaacgcctcggtaacgggcagcgcctgctccgcgccgcggttgcgagttcgggaaggcggccggagtcgcggggaggagagggaggattcgatcggccagaatggggagggggcgcagcgagataaagaggatagagaaccccacgcagcggcagtccaccttctacaagcgcagggacggcctgttcaagaaggccagggagctcgccgtcctctgcgacgccgacctcctcctcctcctcttctccgcctccggcaagctctaccacttcctctcccccaccgtcccctcgtaagctgccctgccacacatccgcttgtcgatccgtcacgtatgtatatgcgcgcgcgctgtctcctgacattgttggttaatccacgtttcgttgctgcttctttcttggcgcagcgtgagggagtttg

SEQ ID NO: 102 - DNA, 728 bp, Oryza sativa
  misc_feature (1)..(728): AY177699 3'-regulatory sequence
  misc_feature (1)..(212): 3'-untranslated sequence
  misc_feature (213)..(728): 3'-nontranscribed sequence
tagaaacagatggacgcttgacgttcagatttcctttattgctgcttagagccagtgttctattatgaaagattatgctgaacttttccggggttaagcaatatctagaagtgtttgcggcaagagctcatcttttgtttcctgatctcatgggaactctctgcacggcgtcatgtattaggcgaatattagcatcacatcggaaactactgaatattaccttcgtcaatcttgttttcactttagacaaaaagaaaaggaaaaagaacaaaaaaaatccagaccgaaggaaaatcagtgagagatctcagcagaaaattgctcgtctccacagactcaaagaagcaacgacaaacaaaacgataacagcaacgaggagctcagcaagaacgtagcgatatagagattataaatcacatcacagagatcatactcaaatctcatcattgctccaaatcgttgcaaatcaatctgaaaaaacggcaagagaggtaaaatcacgctaagcaatagagccatcccaaagcaaaaggaggaaacaaaaaaaacgccacaacgacgggagagaatggggaggctgcgcaatgcccttccggattcactagtcgcccccgggcttttaagagccgcaatcctacaaacggcggggcgaaaaccctaggccgctgaatcgatgaccgtctgatcaaccgttgatggacaagatttcgtatccttgcaccaagcct

SEQ ID NO: 103 - DNA, 2013 bp, Oryza sativa
  misc_feature (1)..(2013): AY177699 5'-regulatory sequence engineered
tccggtcggccctcgtcctccccgtcctctcggcgccggcggtagagaagagagaaaggcggggagatcagcggtggagaagagagaaaggtggggagtgaagagataaaggtgggaaattttgttagagtggtgatacatatgtggtagttgtaaaaattagtaaaatatagtatgtaatatggatgatctgttggagtgaaaagtaatatagagtaggaatctttttggatgactatctaaataagagtatagaagatggaatttagatgagctgttgaggatgctcttatcaattttgcacccaggtgtgctcaattattcaccccctcagacctaccgaaacggagtatagcaaatagtatacgactatacttaatactgagtgtgcttaggaactgaaaaacgtatttatgttctatgtgaaaatgtaacggtctacacgtacagtggcatagctctgtttagttaccaaaataaaaattttcacgttgtcacatcgaatgtttggacacatgcatatagtattaaatttagaaaaaaaaaccaattacatagattgcgtgtaaaattgcaagatgaattttttacgcttacttgcgccatgatttgaaaatgtggtactacagtaaatatttgttaatgatggattaattaggcttaataaattcatctcgcagttttctggcgaaatccgtaatctggcgaaatccgtaatttattttattattagactaaatttaatattttaaatgtgtgtccgtatgtttgatgtgacaaacaaacttaaaattttcctcaattaaaacttttggatgtcacatcagacgtttgatcggatgttgaaaggggttttcggacacgaataaaaaaagtaatttcataactcgcctggaaaccgcgagacgaatcttttgagcctaattaagctgtcattagcacatatgggttactgtagcacttatggctaatcatggactaattatgctcaaaagattcgtctcacgatttacatgcaaaccgtgcatttagtttttttttatctatttttaatgcttcatacatgtatccaaaaattcgatgtgatgtttttgtgaaaagtttttgaaaactaaacggtgcctaaacaaggccatactgggatggctcttcagcgcgcttgaggggctttgagccgatagatagtttcgaaaccaacaaaatgcagtagaagtactctcgagctatagtcgcgacgtgctgccccgcaggagtacagtagtagtacaacgtaagcgggagcaacagactccccccctgcaacccactgtgcctgtgccctcgacgcgtctccgtcgctttggcaaatgtcacgtacatattaccgtctcaggctctcagccatgctccctaccacccctgcagcgaagcaaaagccacgcacgcggcgcctgacatgtaacaggactagaccatcttgttcatttcccgcaccccctcctctcctcttcctccatctgcctctttaaaacagtaaaaataaccgtgcatcccctgggcaaaatctctcccatacatacactacagcggcgaacctttccttattctcgcaacgcctcggtaacgggcagcgcctgctccgcgccgcggttgcgagttcgggaaggcggccggagtcgcggggaggagagggaggattcgatcggccagaatcgggagggggcgcagcgagataaagaggatagagaaccccacgcagcggcagtccaccttctacaagcgcagggacggcctgttcaagaaggccagggagctcgccgtcctctgcgacgccgacctcctcctcctcctcttctccgcctccggcaagctctaccacttcctctcccccaccgtcccctcgtaagctgccctgccacacatccgcttgtcgatccgtcacgtatgtatatgcgcgcgcgctgtctcctgacattgttggttaatccacgtttcgttgctgcttctttcttggcgcagcgtgagccaccatgg

SEQ ID NO: 104 - DNA, 725 bp, Oryza sativa
  misc_feature (1)..(725): AY177699 3'-regulatory sequence engineered
  misc_feature (1)..(209): 3'-untranslated sequence
  misc_feature (210)..(725): 3'-nontranscribed sequence
aaacagatggacgcttgacgttcagatttcctttattgctgcttagagccagtgttctattatgaaagattatgctgaacttttccggggttaagcaatatctagaagtgtttgcggcaagagctcatcttttgtttcctgatctcatgggaactctctgcacggcgtcatgtattaggcgaatattagcatcacatcggaaactactgaatattaccttcgtcaatcttgttttcactttagacaaaaagaaaaggaaaaagaacaaaaaaaatccagaccgaaggaaaatcagtgagagatctcagcagaaaattgctcgtctccacagactcaaagaagcaacgacaaacaaaacgataacagcaacgaggagctcagcaagaacgtagcgatatagagattataaatcacatcacagagatcatactcaaatctcatcattgctccaaatcgttgcaaatcaatctgaaaaaacggcaagagaggtaaaatcacgctaagcaatagagccatcccaaagcaaaaggaggaaacaaaaaaaacgccacaacgacgggagagaatggggaggctgcgcaatgcccttccggattcactagtcgcccccggccttttaagagccgcaatcctacaaacggcggggcgaaaaccctaggccgctgaatcgatgaccgtctgatcaaccgttgatggacaagatttcgtatccttgcaccaagcct

SEQ ID NO: 105 - DNA, 1334 bp, Oryza sativa
  misc_feature (1)..(1334): AY177700 5'-regulatory sequence
  misc_feature (1)..(1049): 5'-nontranscribed sequence
  misc_feature (1050)..(1231): Exon
  misc_feature (1232)..(1318): Intron
  misc_feature (1319)..(1334): Exon
ataagtatttcagaaagctgaagttgaatgttggctcaaattacacccctccaaacttgaaaagaattattcatttacatgatgctagacgagtggccaacatctaggcatttacttacatgcttactggcaacaagtttcagccatgagtactttagagtaaaaaaacagtgccgatgctggtttggctgaatctggatgaaaactgaaaaccaaatgaacaaatatattatttaaggcatactgatgcaagggtggcatacaaacatgttttcaattttgcctttcgatcatacaagaatgcttactaacattaatccatgtcaatgctgcagtggaatatacattatcacaaataaatatacatgattttactgaattttcagcaatattcattaataaacgtacatatcaatcaattttacagtaatacgatattttttctagatccaatgtaacaaacattcaccgcatcttctgccatatgtgatctgatacttgaaacctaaacttttactgatactaacaaacttgctagatagattctccatagagacgtacaggaacttgattccataaacaaggtaaaagagtaagtcatacaacagaactggagaataaatgtatggccagctctatatgctcaagataagccaactttaagggaaagaacaatggagaagtcattagatgtgacataagatcttagaggaacagctaaattaatcataacaaacgaacagcaattatacaagtatatcatatagagatatgacaatatttataagaatctacatgagcaggaagaaagatgtacagtgacctgcaagatgcttttcagtggcttacaacaaagcaatcagtgctatccaaaggtcatactcatattcccttgaaggtggactggtatataaaagcaggccatccacctgcatgtgtacttcgatttgagaggaacacaaggtcaatatctccttgttactagtgccacagctgtagcttcaagtctagtccaggccaaaggttatctgcaggaagagtgaaacaacatggtcagaggaaaggtgcaaatgcgacgaatagagaaccctgtccacagacaggtaaccttctgtaagcgccgtggggggctcctcaagaaggccagggaactatcagtgctttgtgatgctgatgtaggtgttatcatattctcctctcagggaaaactccatgaattagctactaatgggtgtgtttccaaattcatgttttatatagaatttgtaatttgtgaatacaattctgaaatgctttccttttgttcacaaaatgcaagaaatatgcataacttg

SEQ ID NO: 106 - DNA, 1088 bp, Oryza sativa
  misc_feature (1)..(1088): AY177700 3'-regulatory sequence
  misc_feature (1)..(17): 3'-untranslated sequence
  misc_feature (18)..(1088): 3'-nontranscribed sequence
tagccgtcaaaggaccttggtcaattcaactccgggtatatctacaaggcatgcttatcattcaaagagtacatgttatactaagcccatacgaaccgaactgtattttgttgttgtggaccttccgtcttaattaaagtgtgttcaacagatctatatttgtaatgtaagcgtatcgagaagctccatttgttccataatattgtgaaacagcatagtgacaatagactattgtggatttcagttgcaatgcaaaattcagacatgtttcacagattatcacaatcctatgttccgcatcggggaggggaagggggggggggtttacttggccactcacatcacagtcacaggagagcgatgaggacgaagaggaggagcgcggcgacgaaggagtacttgacggcggcggtgaatatggcgaacgagatgagcgccagctgcagcagcagcgacgcgccggcccaggcgagcgcggccgacagcgccaccgccgccgcgttcgctggctccggggtcagcagctccccccaccggatctccgacagcgccgggagcgacgggcccttccgccgcttctcctccccctcctccgccgggggcccaccatcgccatcgccgccgcctccgccgttcgccgccagggcgacggcgaggcggcggcggtggcgggggcggagggtggagggggacgtcggcatcagggagatggggtgggggagtggaggacgacggcgtagggggaggaggaagagtggagctagggttccggccaccgccgccattggagcggtggaggtggagctcgagttgagtggaggagggaaatgagtgggggaatcgggttggcaattgacgccgtgcggtgcgagcacgtggcgttcatccgattggcaatggacggttcagattaactcatcggtgcggtgcaaccgacgtcacaagggtttcaaacacgtcatcataggattcataaccatggacatgttcggttgtactccctccgtctcatagaaaggtaaaccctagaatcatagaaaggtaaactctagaatctcaaagtcaaagtaaaagtactagtaaaatta

SEQ ID NO: 107 - DNA, 1335 bp, Oryza sativa
  misc_feature (1)..(1335): AY177700 5'-regulatory sequence engineered
ataagtatttcagaaagctgaagttgaatgttggctcaaattacacccctccaaacttgaaaagaattattcatttacatgatgctagacgagtggccaacatctaggcatttacttacatgcttactggcaacaagtttcagccatgagtactttagagtaaaaaaacagtgccgatgctggtttggctgaatctggatgaaaactgaaaaccaaatgaacaaatatattatttaaggcatactgatgcaagggtggcatacaaacatgttttcaattttgcctttcgatcatacaagaatgcttactaacattaatccatgtcaatgctgcagtggaatatacattatcacaaataaatatacatgattttactgaattttcagcaatattcattaataaacgtacatatcaatcaattttacagtaatacgatattttttctagatccaatgtaacaaacattcaccgcatcttctgccatatgtgatctgatacttgaaacctaaacttttactgatactaacaaacttgctagatagattctccatagagacgtacaggaacttgattccataaacaaggtaaaagagtaagtcatacaacagaactggagaataaatgtatggccagctctatatgctcaagataagccaactttaagggaaagaacaatggagaagtcattagatgtgacataagatcttagaggaacagctaaattaatcataacaaacgaacagcaattatacaagtatatcatatagagatatgacaatatttataagaatctacatgagcaggaagaaagatgtacagtgacctgcaagatgcttttcagtggcttacaacaaagcaatcagtgctatccaaaggtcatactcatattcccttgaaggtggactggtatataaaagcaggccatccacctgcatgtgtacttcgatttgagaggaacacaaggtcaatatctccttgttactagtgccacagctgtagcttcaagtctagtccaggccaaaggttatctgcaggaagagtgaaacaacaaggtcagaggaaaggtgcaaatccgacgaatagagaaccctgtccacagacaggtaaccttctgtaagcgccgtggggggctcctcaagaaggccagggaactatcagtgctttgtgatgctgatgtaggtgttatcatattctcctctcagggaaaactccatgaattagctactaaagggtgtgtttccaaattcatgttttatatagaatttgtaatttgtgaatacaattctgaaatgctttccttttgttcacaaaatgcaagaaatttgcccaccatgg

SEQ ID NO: 108 - DNA, 1084 bp, Oryza sativa
  misc_feature (1)..(1084): AY177700 3'-regulatory sequence engineered
  misc_feature (1)..(13): 3'-untranslated sequence
  misc_feature (14)..(1084): 3'-nontranscribed sequence
cgtcaaaggaccttggtcaattcaactccgggtatatctacaaggcatgcttatcattcaaagagtacatgttatactaagcccatacgaaccgaactgtattttgttgttgtggaccttccgtcttaattaaagtgtgttcaacagatctatatttgtaatgtaagcgtatcgagaagctccatttgttccataatattgtgaaacagcatagtgacaatagactattgtggatttcagttgcaatgcaaaattcagacatgtttcacagattatcacaatcctatgttccgcatcggggaggggaagggggggggggtttacttggccactcacatcacagtcacaggagagcgatgaggacgaagaggaggagcgcggcgacgaaggagtacttgacggcggcggtgaatatggcgaacgagatgagcgccagctgcagcagcagcgacgcgccggcccaggcgagcgcggccgacagcgccaccgccgccgcgttcgctggctccggggtcagcagctccccccaccggatctccgacagcgccgggagcgacgggcccttccgccgcttctcctccccctcctccgccgggggcccaccatcgccatcgccgccgcctccgccgttcgccgccagggcgacggcgaggcggcggcggtggcgggggcggagggtggagggggacgtcggcatcagggagatggggtgggggagtggaggacgacggcgtagggggaggaggaagagtggagctagggttccggccaccgccgccattggagcggtggaggtggagctcgagttgagtggaggagggaaatgagtgggggaatcgggttggcaattgacgccgtgcggtgcgagcacgtggcgttcatccgattggcaatggacggttcagattaactcatcggtgcggtgcaaccgacgtcacaagggtttcaaacacgtcatcataggattcataacgatggacatgttcggttgtactccctccgtctcatagaaaggtaaaccctagaatcatagaaaggtaaactctagaatctcaaagtcaaagtaaaagtactagtaaaatta

SEQ ID NO: 109 - DNA, 3338 bp, Oryza sativa
  misc_feature (1)..(3338): AY177702 5'-regulatory sequence
  misc_feature (1)..(1981): 5'-nontranscribed sequence
  misc_feature (1982)..(2163): Exon
  misc_feature (2164)..(3325): Intron
  misc_feature (3326)..(3338): Exon
tcttttcgcaaactaaacaaggccttaacatgctagaaatttagaaaattccacattaattgactataatccatcctaaattttcatccatggcatctaggaagagatcaataatgatgttgacaaccaaattcggcaccagattgattctattcataaattgcagaattaagagccattttcgtagaaggctgtggttaattagaccgcagtgcatatgccggtttgatcaggaccatggcagtctgatggccaatctgattggcgtggagcatgcggcctaaccggcaaactccgagtccgatagagtctcatgttcttctgcttgtttgagatttttttagtcctaatacattccaggacctacttacactacgagaattcagaatttgcttggtggccatctaatctctttggcggttcgacatcacctaaggtaaagtgtattcttatcggtctagactgccaaggttatatttcttgactattcgaaagtttaatattctccgtagttttcttggcggttagaccgccaataaaattttctctcacggttagcagccaagaaacctggattttcctgtcactctagacttggcggttggatgtcaaaatatattatcttagtggttttcatgctatccttggtggtttttggccgcgaagaaaattccgaattcttgtagtgttgggacgtggataggctttgtttatgtaagatcaacccctttataagagctataactaattcatcgagacaaccagcacacaatcaatcaaagaatcgttcttataccctttttctttacttctacccctttaaccctagttcatccatcttcatcaatttgcattgaaagccatccactttttgcggcgagagtacgaaatcttttataggtttgtcccaaaaatcttccgttccgtccatgatatggttgtttatccccaaattaatctaaattggttctgctagcctattttgattctatcaccgccaagatcagaagccacaccatctactttgggcaatggttcaagatcaagaggcaccactacttcatctacatcaacaataccggaggctcgatcggtttgtgtgtcgtcaaatagtcttttgtaacacgtatatggctccagcatggattcatgtccagctaattattgcaagcaaaatgagatgtgttgagtcctttcctatcacttacatgacactatacatattaatttttagcttatatgcaattctatagccagtattatgaatggggagtggtacctattttgagcaaacgatgaggtgtacaatatcgtactggaaaatgtaaaatgtacttatcatgagctgtagccgcactcataaccaatcaataactggcacaaggaaagccatggaacatctttacatggtctttcttgcggcatggttttaaagtagcaaattcgtgctaccgtatatgaacatgtgaccgtgacacaaaatcaagaaatccagaatgaacatggatcctaagcacatgacctcaccgatcgatcaccaccaaagcctttttccatttgtgtggcaataataattaaagttttgtatagtttagtacatggcgccggcgggtaattaagctgcagccacctgcatccgatccattcgtgcatataacctaaccacccatttcgccttctctccactctctctcctctccctctctctctctctctgtctctctctctcggggtattgcaagatagtagctaattaaccagcctttggccttcagtttccccatcggttcatcagagcacgccttcaatttcctaatcaatctcccatataattccccttagcttgtatgcctatcattagtacttcttgtgttgtgttgtcttcttgccttctttgagctagagctagctaggtttgtgacctgctgtacgtgcgtgtgttaattagatagatgtcttagatctgggagagagcgaggagatggggagggggaagatagtgataaggaggatagacaactcgacgagcaggcaggtgacgttctcgaagcgtcggaacgggcttctgaagaaggcgaaggagctatccatcctctgcgatgcggaggtcggccttgtcgtcttctccagcaccggcaggctctatgagttctccagcaccaagtaagcaatccatcggatttataagtatatatgtatatttcccctaatttaattgtagtttccttagttgttctcggatctgctttgaagtctccttttgttcttgatttatttttgaaagaactctccttgttctttcacttgataggtatatatatctggttctggtaatctttcatccttttaagtttgagacgtttttatcaacaaaatgacccaagtatatgtctgatcagcttttcatcctttcaagttttgaggcatttttatcaacacaaagacccaagctaagcatatatgtatgcatggctattagtcattcttgtgatcttttagtaagctatagctacatagcaatcaatatgtatgcatatagtgtcagtttaattgtgatattttccctccgttctcgaaaacaattgacacttggcactactaagttttgatcactccttttctttcaaaaaatttataaacacttaaaatatgttatattattaaagtatgtagcgtagaaaatataaccatacaacttccattcatcatcatataattatttaaaagtaatttgtgatcaaagtaacagccgtagtactcaaccgtgtcaaccaagtcagttattcaagaactgagggagtaaatattgaatgcaaaattaatatgaaaattttttcttctgctatatatcctttttcagcgtacgtatgttcactcttctgaattgattacaacttagaaactcaaggtggatatatagcgaagaaatattaacatgttaacgtttaataaaattagatgaatttgttctctttttttttgtttcaagtgatgttgatttgtaccaaaatcagatggcatgtgtcacggtcaaacttattaattaaagagatttagcatgcaatcttgacaatcaaatctttacagagaatggcatttctatatatgaagccttacatgcatgtgcataaatatttttttggagctagagtgtggtagctttacgtgccactgcatcaaagacagatagatatttccagatttttaaatatctatttatctgtgtgttttgtctaagtaaattgaaggttttttaatataagctgtatgttttagctaaaaatgaaacaactgactcaaccatttggctttacttgcatgctagcatgaaaactgtg

SEQ ID NO: 110 - DNA, 886 bp, Oryza sativa
  misc_feature (1)..(886): AY177702 3'-regulatory sequence
  misc_feature (1)..(285): 3'-untranslated sequence
  misc_feature (286)..(886): 3'-nontranscribed sequence
taagactatgccgtacaagctggacgataagtgatcaatttcaaacaagcacaaagcctttcagatgcaagtagtatttttgtgatagctgagacaataaaaaagtgtacagactacagactggacagattatgttgtcggatgctcatgtaatgactgtggtgtaataagaaatacgtagtataagtttgtaaccctgcttactctctattgctttctagaaaagctcaaccaaaactctgaaaagtctttggactgaaaaggttgtaacaatgtttaccaggaaggtgctttggtgatgaaaaaagagttgtcactatgcctaagaaggaaggggtgtgagctactggcgaaaactgttatgtattgcacatggtgaataatggctgttgaacatgtctactcagacttaacagtcagcccttactcatggctgttcaagtggtgttacagatgaaggtgcatccaacccaattcaaagcagcaacactcatactggtgctgcaaataccgtgtatgctagagagaggtggttggatagaaggcccatgtatcatgtcatgtcattgattcacaatttcacgtgtcgcaacatttattattagtagtattctactgcaagtctgcaactaagaaataaatcttctgttaaacatgaacggctcctgatgcaatacactggagttaaccactaaaatctcagcaattgaaagttccacttagaaaagcccataccacattaaaatggtaatgcctgtatttaattgattttgaattaaaagtggtgctatcaactttgagttccaaaactaattatttccaaagaaaaaggtaattcaataattaccatcacttggtatagattggtcttctgtgacaaccacgg

SEQ ID NO: 111 - DNA, 3339 bp, Oryza sativa
  misc_feature (1)..(3339): AY177702 5'-regulatory sequence engineered
tcttttcgcaaactaaacaaggccttaacatgctagaaatttagaaaattccacattaattgactataatccatcctaaattttcatcgatggcatctaggaagagatcaataatgatgttgacaaccaaattcggcaccagattgattctattcataaattgcagaattaagagccattttcgtagaaggctgtggttaattagaccgcagtgcatatgccggtttgatcaggaccatgccagtctgatggccaatctgattggcgtggagcatgcggcctaaccggcaaactccgagtccgatagagtctcatgttcttctgcttgtttgagatttttttagtcctaatacattccaggacctacttacactacgagaattcagaatttgcttggtggccatctaatctctttggcggttcgacatcacctaaggtaaagtgtattcttatcggtctagactgccaaggttatatttcttgactattcgaaagtttaatattctccgtagttttcttggcggttagaccgccaataaaattttctctcacggttagcagccaagaaacctggattttcctgtcactctagacttggcggttggatgtcaaaatatattatcttagtggttttcatgctatccttggtggtttttggccgcgaagaaaattccgaattcttgtagtgttgggacgtggataggctttgtttatgtaagatcaacccctttataagagctataactaattcatcgagacaaccagcacacaatcaatcaaagaatcgttcttataccctttttctttacttctacccctttaaccctagttcatccatcttcatcaatttgcattgaaagccatccactttttgcggcgagagtacgaaatcttttataggtttgtcccaaaaatcttccgttccgtccatgatatggttgtttatccccaaattaatctaaattggttctgctagcctattttgattctatcaccgccaagatcagaagccacaccatctactttgggcaatggttcaagatcaagaggcaccactacttcatctacatcaacaataccggaggctcgatcggtttgtgtgtcgtcaaatagtcttttgtaacacgtatatggctccagcatggattcatgtccagctaattattgcaagcaaaatgagatgtgttgagtcctttcctatcacttacatgacactatacatattaatttttagcttatatgcaattctatagccagtattatgaatggggagtggtacctattttgagcaaacgatgaggtgtacaatatcgtactggaaaatgtaaaatgtacttatcatgagctgtagccgcactcataaccaatcaataactggcacaaggaaagccttggaacatctttacatggtctttcttgcggcatggttttaaagtagcaaattcgtgctaccgtatatgaacatgtgaccgtgacacaaaatcaagaaatccagaatgaacatggatcctaagcacatgacctcaccgatcgatcaccaccaaagcctttttccatttgtgtggcaataataattaaagttttgtatagtttagtacatggcgccggcgggtaattaagctgcagccacctgcatccgatccattcgtgcatataacctaaccacccatttcgccttctctccactctctctcctctccctctctctctctctctgtctctctctctcggggtattgcaagatagtagctaattaaccagcctttggccttcagtttccccatcggttcatcagagcacgccttcaatttcctaatcaatctcccatataattccccttagcttgtatgcctatcattagtacttcttgtgttgtgttgtcttcttgccttctttgagctagagctagctaggtttgtgacctgctgtacgtgcgtgtgttaattagatagatgtcttagatctgggagagagcgaggagatcgggagggggaagatagtgataaggaggatagacaactcgacgagcaggcaggtgacgttctcgaagcgtcggaacgggcttctgaagaaggcgaaggagctatccatcctctgcgatgcggaggtcggccttgtcgtcttctccagcaccggcaggctctatgagttctccagcaccaagtaagcaatccatcggatttataagtatatatgtatatttcccctaatttaattgtagtttccttagttgttctcggatctgctttgaagtctccttttgttcttgatttatttttgaaagaactctccttgttctttcacttgataggtatatatatctggttctggtaatctttcatccttttaagtttgagacgtttttatcaacaaaatgacccaagtatatgtctgatcagcttttcatcctttcaagttttgaggcatttttatcaacacaaagacccaagctaagcatatatgtatgcatggctattagtcattcttgtgatcttttagtaagctatagctacatagcaatcaatatgtatgcatatagtgtcagtttaattgtgatattttccctccgttctcgaaaacaattgacacttggcactactaagttttgatcactccttttctttcaaaaaatttataaacacttaaaatatgttatattattaaagtatgtagcgtagaaaatataaccatacaacttccattcatcatcatataattatttaaaagtaatttgtgatcaaagtaacagccgtagtactcaaccgtgtcaaccaagtcagttattcaagaactgagggagtaaatattgaatgcaaaattaatatgaaaattttttcttctgctatatatcctttttcagcgtacgtatgttcactcttctgaattgattacaacttagaaactcaaggtggatatatagcgaagaaatattaacatgttaacgtttaataaaattagatgaatttgttctctttttttttgtttcaagtgatgttgatttgtaccaaaatcagatggcatgtgtcacggtcaaacttattaattaaagagatttagcatgcaatcttgacaatcaaatctttacagagaatggcatttctatatatgaagccttacatgcatgtgcataaatatttttttggagctagagtgtggtagctttacgtgccactgcatcaaagacagatagatatttccagatttttaaatatctatttatctgtgtgttttgtctaagtaaattgaaggttttttaatataagctgtatgttttagctaaaaatgaaacaactgactcaaccatttggctttacttgcatgctagcttgaccaccatgg

SEQ ID NO: 112 - DNA, 880 bp, Oryza sativa
  misc_feature (1)..(880): AY177702 3'-regulatory sequence engineered
  misc_feature (1)..(282): 3'-untranslated sequence
  misc_feature (283)..(880): 3'-nontranscribed sequence
gactatgccgtacaagctggacgataagtgatcaatttcaaacaagcacaaagcctttcagatgcaagtagtatttttgtgatagctgagacaataaaaaagtgtacagactacagactggacagattatgttgtcggatgctcatgtaatgactgtggtgtaataagaaatacgtagtataagtttgtaaccctgcttactctctattgctttctagaaaagctcaaccaaaactctgaaaagtctttggactgaaaaggttgtaacaatgtttaccaggaaggtgctttggtgatgaaaaaagagttgtcactatgcctaagaaggaaggggtgtgagctactggcgaaaactgttatgtattgcacatggtgaataatggctgttgaacatgtctactcagacttaacagtcagcccttactcatggctgttcaagtggtgttacagatgaaggtgcatccaacccaattcaaagcagcaacactcatactggtgctgcaaataccgtgtatgctagagagaggtggttggatagaaggcccatgtatcatgtcatgtcattgattcacaatttcacgtgtcgcaacatttattattagtagtattctactgcaagtctgcaactaagaaataaatcttctgttaaacatgaacggctcctgatgcaatacactggagttaaccactaaaatctcagcaattgaaagttccacttagaaaagcccataccacattaaaatggtaatgcctgtatttaattgattttgaattaaaagtggtgctatcaactttgagttccaaaactaattatttccaaagaaaaaggtaattcaataattaccatcacttggtatagattggtcttctgtgacaacca

SEQ ID NO: 113 - DNA, 3341 bp, Oryza sativa
  misc_feature (1)..(3341): AY224482 5'-regulatory sequence
  misc_feature (1)..(1981): 5'-nontranscribed sequence
  misc_feature (1982)..(2163): Exon
  misc_feature (2164)..(3325): Intron
  misc_feature (3326)..(3341): Exon
tcttttcgcaaactaaacaaggccttaacatgctagaaatttagaaaattccacattaattgactataatccatcctaaattttcatccatggcatctaggaagagatcaataatgatgttgacaaccaaattcggcaccagattgattctattcataaattgcagaattaagagccattttcgtagaaggctgtggttaattagaccgcagtgcatatgccggtttgatcaggaccatggcagtctgatggccaatctgattggcgtggagcatgcggcctaaccggcaaactccgagtccgatagagtctcatgttcttctgcttgtttgagatttttttagtcctaatacattccaggacctacttacactacgagaattcagaatttgcttggtggccatctaatctctttggcggttcgacatcacctaaggtaaagtgtattcttatcggtctagactgccaaggttatatttcttgactattcgaaagtttaatattctccgtagttttcttggcggttagaccgccaataaaattttctctcacggttagcagccaagaaacctggattttcctgtcactctagacttggcggttggatgtcaaaatatattatcttagtggttttcatgctatccttggtggtttttggccgcgaagaaaattccgaattcttgtagtgttgggacgtggataggctttgtttatgtaagatcaacccctttataagagctataactaattcatcgagacaaccagcacacaatcaatcaaagaatcgttcttataccctttttctttacttctacccctttaaccctagttcatccatcttcatcaatttgcattgaaagccatccactttttgcggcgagagtacgaaatcttttataggtttgtcccaaaaatcttccgttccgtccatgatatggttgtttatccccaaattaatctaaattggttctgctagcctattttgattctatcaccgccaagatcagaagccacaccatctactttgggcaatggttcaagatcaagaggcaccactacttcatctacatcaacaataccggaggctcgatcggtttgtgtgtcgtcaaatagtcttttgtaacacgtatatggctccagcatggattcatgtccagctaattattgcaagcaaaatgagatgtgttgagtcctttcctatcacttacatgacactatacatattaatttttagcttatatgcaattctatagccagtattatgaatggggagtggtacctattttgagcaaacgatgaggtgtacaatatcgtactggaaaatgtaaaatgtacttatcatgagctgtagccgcactcataaccaatcaataactggcacaaggaaagccatggaacatctttacatggtctttcttgcggcatggttttaaagtagcaaattcgtgctaccgtatatgaacatgtgaccgtgacacaaaatcaagaaatccagaatgaacatggatcctaagcacatgacctcaccgatcgatcaccaccaaagcctttttccatttgtgtggcaataataattaaagttttgtatagtttagtacatggcgccggcgggtaattaagctgcagccacctgcatccgatccattcgtgcatataacctaaccacccatttcgccttctctccactctctctcctctccctctctctctctctctgtctctctctctcggggtattgcaagatagtagctaattaaccagcctttggccttcagtttccccatcggttcatcagagcacgccttcaatttcctaatcaatctcccatataattccccttagcttgtatgcctatcattagtacttcttgtgttgtgttgtcttcttgccttctttgagctagagctagctaggtttgtgacctgctgtacgtgcgtgtgttaattagatagatgtcttagatctgggagagagcgaggagatggggagggggaagatagtgataaggaggatagacaactcgacgagcaggcaggtgacgttctcgaagcgtcggaacgggcttctgaagaaggcgaaggagctatccatcctctgcgatgcggaggtcggccttgtcgtcttctccagcaccggcaggctctatgagttctccagcaccaagtaagcaatccatcggatttataagtatatatgtatatttcccctaatttaattgtagtttccttagttgttctcggatctgctttgaagtctccttttgttcttgatttatttttgaaagaactctccttgttctttcacttgataggtatatatatctggttctggtaatctttcatccttttaagtttgagacgtttttatcaacaaaatgacccaagtatatgtctgatcagcttttcatcctttcaagttttgaggcatttttatcaacacaaagacccaagctaagcatatatgtatgcatggctattagtcattcttgtgatcttttagtaagctatagctacatagcaatcaatatgtatgcatatagtgtcagtttaattgtgatattttccctccgttctcgaaaacaattgacacttggcactactaagttttgatcactccttttctttcaaaaaatttataaacacttaaaatatgttatattattaaagtatgtagcgtagaaaatataaccatacaacttccattcatcatcatataattatttaaaagtaatttgtgatcaaagtaacagccgtagtactcaaccgtgtcaaccaagtcagttattcaagaactgagggagtaaatattgaatgcaaaattaatatgaaaattttttcttctgctatatatcctttttcagcgtacgtatgttcactcttctgaattgattacaacttagaaactcaaggtggatatatagcgaagaaatattaacatgttaacgtttaataaaattagatgaatttgttctctttttttttgtttcaagtgatgttgatttgtaccaaaatcagatggcatgtgtcacggtcaaacttattaattaaagagatttagcatgcaatcttgacaatcaaatctttacagagaatggcatttctatatatgaagccttacatgcatgtgcataaatatttttttggagctagagtgtggtagctttacgtgccactgcatcaaagacagatagatatttccagatttttaaatatctatttatctgtgtgttttgtctaagtaaattgaaggttttttaatataagctgtatgttttagctaaaaatgaaacaactgactcaaccatttggctttacttgcatgctagcatgaaaactgtgata

SEQ ID NO: 114 - DNA, 886 bp, Oryza sativa; identical to SEQ ID NO: 110
  misc_feature (1)..(886): AY224482 3'-regulatory sequence
  misc_feature (1)..(285): 3'-untranslated sequence
  misc_feature (286)..(886): 3'-nontranscribed sequence

SEQ ID NO: 115 - DNA, 3342 bp, Oryza sativa
  misc_feature (1)..(3342): AY224482 5'- regulatory sequence engineered
tcttttcgcaaactaaacaaggccttaacatgctagaaatttagaaaattccacattaattgactataatccatcctaaattttcatgcatggcatctaggaagagatcaataatgatgttgacaaccaaattcggcaccagattgattctattcataaattgcagaattaagagccattttcgtagaaggctgtggttaattagaccgcagtgcatatgccggtttgatcaggaccatcgcagtctgatggccaatctgattggcgtggagcatgcggcctaaccggcaaactccgagtccgatagagtctcatgttcttctgcttgtttgagatttttttagtcctaatacattccaggacctacttacactacgagaattcagaatttgcttggtggccatctaatctctttggcggttcgacatcacctaaggtaaagtgtattcttatcggtctagactgccaaggttatatttcttgactattcgaaagtttaatattctccgtagttttcttggcggttagaccgccaataaaattttctctcacggttagcagccaagaaacctggattttcctgtcactctagacttggcggttggatgtcaaaatatattatcttagtggttttcatgctatccttggtggtttttggccgcgaagaaaattccgaattcttgtagtgttgggacgtggataggctttgtttatgtaagatcaacccctttataagagctataactaattcatcgagacaaccagcacacaatcaatcaaagaatcgttcttataccctttttctttacttctacccctttaaccctagttcatccatcttcatcaatttgcattgaaagccatccactttttgcggcgagagtacgaaatcttttataggtttgtcccaaaaatcttccgttccgtccatgatatggttgtttatccccaaattaatctaaattggttctgctagcctattttgattctatcaccgccaagatcagaagccacaccatctactttgggcaatggttcaagatcaagaggcaccactacttcatctacatcaacaataccggaggctcgatcggtttgtgtgtcgtcaaatagtcttttgtaacacgtatatggctccagcatggattcatgtccagctaattattgcaagcaaaatgagatgtgttgagtcctttcctatcacttacatgacactatacatattaatttttagcttatatgcaattctatagccagtattatgaatggggagtggtacctattttgagcaaacgatgaggtgtacaatatcgtactggaaaatgtaaaatgtacttatcatgagctgtagccgcactcataaccaatcaataactggcacaaggaaagccaaggaacatctttacatggtctttcttgcggcatggttttaaagtagcaaattcgtgctaccgtatatgaacatgtgaccgtgacacaaaatcaagaaatccagaatgaacatggatcctaagcacatgacctcaccgatcgatcaccaccaaagcctttttccatttgtgtggcaataataattaaagttttgtatagtttagtacatggcgccggcgggtaattaagctgcagccacctgcatccgatccattcgtgcatataacctaaccacccatttcgccttctctccactctctctcctctccctctctctctctctctgtctctctctctcggggtattgcaagatagtagctaattaaccagcctttggccttcagtttccccatcggttcatcagagcacgccttcaatttcctaatcaatctcccatataattccccttagcttgtatgcctatcattagtacttcttgtgttgtgttgtcttcttgccttctttgagctagagctagctaggtttgtgacctgctgtacgtgcgtgtgttaattagatagatgtcttagatctgggagagagcgaggagatcgggagggggaagatagtgataaggaggatagacaactcgacgagcaggcaggtgacgttctcgaagcgtcggaacgggcttctgaagaaggcgaaggagctatccatcctctgcgatgcggaggtcggccttgtcgtcttctccagcaccggcaggctctatgagttctccagcaccaagtaagcaatccatcggatttataagtatatatgtatatttcccctaatttaattgtagtttccttagttgttctcggatctgctttgaagtctccttttgttcttgatttatttttgaaagaactctccttgttctttcacttgataggtatatatatctggttctggtaatctttcatccttttaagtttgagacgtttttatcaacaaaatgacccaagtatatgtctgatcagcttttcatcctttcaagttttgaggcatttttatcaacacaaagacccaagctaagcatatatgtatgcatggctattagtcattcttgtgatcttttagtaagctatagctacatagcaatcaatatgtatgcatatagtgtcagtttaattgtgatattttccctccgttctcgaaaacaattgacacttggcactactaagttttgatcactccttttctttcaaaaaatttataaacacttaaaatatgttatattattaaagtatgtagcgtagaaaatataaccatacaacttccattcatcatcatataattatttaaaagtaatttgtgatcaaagtaacagccgtagtactcaaccgtgtcaaccaagtcagttattcaagaactgagggagtaaatattgaatgcaaaattaatatgaaaattttttcttctgctatatatcctttttcagcgtacgtatgttcactcttctgaattgattacaacttagaaactcaaggtggatatatagcgaagaaatattaacatgttaacgtttaataaaattagatgaatttgttctctttttttttgtttcaagtgatgttgatttgtaccaaaatcagatggcatgtgtcacggtcaaacttattaattaaagagatttagcatgcaatcttgacaatcaaatctttacagagaatggcatttctatatatgaagccttacatgcatgtgcataaatatttttttggagctagagtgtggtagctttacgtgccactgcatcaaagacagatagatatttccagatttttaaatatctatttatctgtgtgttttgtctaagtaaattgaaggttttttaatataagctgtatgttttagctaaaaatgaaacaactgactcaaccatttggctttacttgcatgctagcttgaaaaccaccatgg

SEQ ID NO: 116 - DNA, 880 bp, Oryza sativa; identical to SEQ ID NO: 112
  misc_feature (1)..(880): AY224482 3'-regulatory sequence engineered
  misc_feature (1)..(282): 3'-untranslated sequence
  misc_feature (283)..(880): 3'-nontranscribed sequence

SEQ ID NO: 117 - DNA, 6719 bp, Oryza sativa
  misc_feature (1)..(6719): AY250075 5'-regulatory sequence
  misc_feature (1)..(1685): 5'-nontranscribed sequence
  misc_feature (1)..(6719): n is a, c, g, or t
  misc_feature (370)..(370): n is a, c, g, or t
  misc_feature (1686)..(1873): Exon
  misc_feature (1874)..(6702): Intron
  misc_feature (6703)..(6719): Exon
gaaatggtttcattttgggacaagttattgtgctaaaaatagctattctagaaagataaaatttgaataagatgaattttttttaattgagagagtaattggggtaagacgaagagaaatttgaatgagataggattgaagtgacaagtactagtactctagaattgcatgcactgatttgaaaataaatttagattctgaaattgtgcttactcctttcgtaaaaaaaaactaacctatgattagatgtagcatatccttacaacaaatttgtacatgaacttatccaaattcattgtattaggatatatcacatccaatagtagatttggttttttttttggaccgggggggttatttgaaatggagncagtacatgactaatgacatctctcggtggctttttttttttcaaacaataaaaatttctacaagtgatgttgaatcctgttgtactccctcttttccataaaatcaatctaaaatggatggaatgtaagtatgtgaatgaatctaatataattttgtaccacgttgcgtggtggctgaaaggataacaccagacatggggacagacatacatactactactagtactccctccgtaaaagaaaagaacaaatctaagattggatgtgatattttctagaacaatgaataatagaagcttgtccagatttattatactaggaaatgtctcatcaaatactagattggtttttttttacggaggaaatatttaattattatagattaccatgttcaatcttttcatcaacaacaaaaatgtcaatggagtaatcgacggcaatccccggcagctataggccttgtttagttcccaaattttttttccctaaaaacattatatcgaatctttggacacatgatagcattaaatatagataaaaaactaattgcaaaagtttatatggaaatcgcgagacaaatcttttgagcctaattagtccataattagccataagtgctatacattaaccccatatgtgctaatgatggattaattaggcttaataaattcgtctcgcggtttccaggcgagttatgaaattagttttttccttcgtgtccaaaaacccccttccgacattcggtcaaacgtccgatgtgacacccagaaattttcttttcgcgatttaaacacatatataatagtagagtcaaaatatgccaagttggaatgaaaactttgcatgtcactttattaattattccactctcttgaggatctgaaacatacatagtatttattattataggggtgttcccatgttcaataatcttttcatcaacgagtacaatgtcaatatggatcagtaatcgacggcaagaccggggcaggcagctaggccggggaagaaaggaatctgcgctgcagtagcactctctgacctgtgggccccctacccccctcatctctctccaacgtacccacacagcgtcccacctcgccgccggagccaatgagagatcgacgacgatcgacgtctaccagtccacgaacgagtacaattcgccataaataaatagggcgccacacccctcagctcgatcccctagctctcgatcggctgcaagaagctatagctagcctagctcatctcgccggagaagaagctaaggcagcaggcagagagagagagagagagagagagagagagatgatggggagggggaaggtgcaggtgcggcggatcgagaacgaggtgagccggcaggtgaccttctccaagcggcggccggggctgctcaagaaggcccacgagatcgccgtcctctgcgacgtcgacgtcgccgccatcgtcttctccgccaagggcaacctcttccactacgcctcctcccacaccacgtacgtcactatcactactcctgctgcattttccatacaatacgtacaaaataacaaaagcagtagatatatatagttagctcaattaatatgatggattatttcagaaacatttaacttctctctctctctctctctctctcttccctggcatgcatcgtccatgtatcaaattaaaagatgatcaagaatgcaatgtgaaaaatatataacaacccgtgtacacctgtgagtttacaaatacaagcatttcaagcgttcataatttatccatccataaatataagtgttacaggatatactacttattctatcgtctatcacccttctttcaaacttcctccggatgcatgcatatcgatccctcattcaacaagggatattttagtcgctaaacaaattataaatacctatattaattcatcgatagagggggagttagcaagtactccctctgtcccacaatgctggtcgtccaaggaatgtagagaaaataattgctctggatgaaacttaccaggatgccccaaaacattagttgcagtagtcattttaacacaagtacaccagccacataatggtgccatacacctaatttgaatgctttggcacctagaaatttgacaggagcactagatggtgctagggatgaaaacggagcggatacggacggataatgctcataccatattcgttttcatattttttaccggatacgaaaacgaatacggatagctcgaatacggaaacaaatacggattatctcgaatacgaataagaatcgaatatgatcggacacgaatacggaaacaaatttttctcgaacacgaaaaccaactcaacttctaatggaaacaaatatcaacatatataattagctcattttatataaaatgaggtataatttataaatattttttaaaatttaaataatattaatagtatggactagtgttaagagataaactactattaaaatctataaacgtatattgaaggtcatagagttagaaagaaatggggtatgtctcatgggtcctgcggatatccgaatagcactgttcaccggatatccgaattattatccgtatccgacagaaaccttggtaccatatttgtattcgtatccgggagaaaatatccgtattcgtatccgtatccgaactatccgagaattatctgatccgaaaggtatccgtatccatttttgtccggagcggacggaaactatccgctccgttttcatccctagatggtgccacttttctgcgccattattactgccgatgggcgagtacaacgtcaaccattctaggatatttgttagccagtaaaacgatctcctttgtgggagggaggaagtagacattgtacacttcatagggcctgtttggagaactatctcagggatatttttttgctaaagattatcccaccaaaatagccctcttgctgtttggatccaagggctatttagctattattgtaccatcccaatcatttgtctccactaaaagtatacaacagccggatcttctatagctaatccaatacaggcacatacaagcatacacaattccttacaagcacaaactcataatttgtctcaaatgtataagcaagtccgtaaaataattgcacgccaaccgcggcccccacgtccgcggtcgcggccacagttggttgccatggcgcgttgccgacggcgacccattgcccctgatgaggagctgcctcgcccagggctgccgccgtctatgcccgatgactacccaccttttccaccgtgtccagcacggtcacctgccgcgccgaagttgagccggcgggagcgcggtgcaccacgagacggcccggcgggcgcgtggtgcaccacgagacggcccggtgccctatcgaccagcccttactcccagagagcgtggtgcgcggatgggagggagaccggagcctcggccatggccagctccttcctcgccgccaccctggaggaaggcactgtactcgtggaggtgagggaactcctggcccgacgacgcctgggtgttgaggtccagcgtgtccacgccggtgcggggaacggatccgtgggaagggccggacgccgacggctgcgagggccaaatgttgccggcggcggacgaaatgggatcttgggagaagaaatcgaagccgttggggtccatctccgcgcggattcggtgcacagcgatgcgtcgacgacggatctgatggccggcaacgcgggtggggtgagttgccagtgtggatgcctctcggtggatctgaaggaaggggcagcgcgattcgagggagagggcggcgcgggtgaagggccgggcggcggcgtgggtggggggagggggaggagaagctagggccgggcggcggcgcgggtgtggggagggggaggcgaagctgggccgggcggcggcgagggttctagagagtgagcgggggcgacagcgagcgggggcgaaatgcgatgggttttgccgcaacgggatcggcacaagtgggggaaagtgggaatcggtggggcccacagcaaaatagccccaattagcacccggtgggggtgataattttttggggtgggctatttgcaaatagccctaaaatagccctcctgtttggatccccttgagctattttggggttaaaaggggtgggctaaaaaatatccctaggatccaaacaccgccatagaacgatattatgcatagagattctccttactatcttgtaccaccggtaagtacacggcaataatttgctgagccagctttatttcctcttatgggaactgttatacctgcccaggggtactatttttggtagatgcatgtcggccccattcttctcttgtcctagtatatgcagtattaccttagtcctattgcatatactacattcgtcctattttaagtgcatctatagtttttcgtgcctaacttcgattgttgtcttatttagaaaaaaaaattaaaaatataagtcacacataagatacttatcatgttttatcatcttataacaataaaaatactaattataaaaaaaatttaaataagacggacgattaaaattggacacgaaaactcatgggctacactaaaacgagacggatagagtagtattaatagagtagtattaggaacagccttttgacttgtctacggcaatgcacaaatagtaatcaatataatctaatcatatcttttattgataggaacaattgtttgcacagtactgatatatgtatattttttttcatgttatttcagatcatatacatgaaactcataatcaaccttctattctgttgatttatataattaataatttgaatctgtagacaatccagatcatgctatatggagtataacattattaattgcctctttgtaaataaccattatcagaactatatattcatcttcaaactttgatcactactcgttctttaaaagacaaatacttaaaaatgtattatcaaagtgtgccgcattaatcgtgaaatagttttcgtttatcatagtctaaccatttgcaagatattagatgcatcctcttgttttctctcaatccctccaactcaactcaaattgtactcagtgatgccattccttttacacaattaattgcatgatgttacacttacacaccattgtttacgccctaacgaaactaatgtgtagtgcacgtaaaacgaagcgattcattagcgcataattaattaagtatttagttttttttaaaagggattaatatgattttttttaaaacaactttggtgtagaaattttttttaaaaatgtactgtttaatagtttaggaagcgtgcgcgcggaaaacaagaagaaggaagttaggaaccgaagtaacaaacacaaccttagggcactcccaaccctccacctagtatgatgtctatggcattaactacattgccatgtaggacttttagcttatgtggcactatattaattaagagagagggagtgaagagaggaagaaactgggtctcatgcaagacacagcttcaacacgagaacctatgcactagacactatcaagttttgcattgggagagaatagtgtcttcataatagatgaaaaataaatatgattggtagagaagagatatgatgtatttattaatggtctattattttaagaaaccatggattatatagtgtagtgtgatttcttattgacatggcaccatagacactgcttatggacaatatggattgggactgtctttaatccaatcaaaccaaggccaccccgtgaatgttcactgcatacgcatagcactattcacatgagacagacccatggctgggcctaccaaccgtcacatattgatctggaaggacatgcactattcagcgcgtgtgagatgcccaatcaaagaaataactgaaattgatgtagataatttgtttacttaaacaccgtgggaacgctggaaagttaggggtgccacgtcagatgttacttttgtaaaaaagcccccgcagttctgttaattatgcattggtccccgctgataatttatagtataaattagctaggtttggctatcgttgagcattggccgaaattctattctattaactaaacaaattagctaggtgacttgaagtgaagtgagtgtactcaccatccaattatagttaattagggtctgtttattttgttgccactttcgattcattaatattcatgtgtgagggcgggaatattgtgaacattttaagttagttttttttattagaggaagtatatcctaataattgattctcatattttattgatagtatggagcgaatccttg

SEQ ID NO: 118 - DNA, 674 bp, Oryza sativa
  misc_feature (1)..(674): AY250075 3'-regulatory sequence
  misc_feature (1)..(299): 3'-untranslated sequence
  misc_feature (300)..(674): 3'-nontranscribed sequence
tagaagatgttcagatgaaatggtccctgcagccattgcatggttgctgaataatgtcgtcccagatggttaggcaagcaacctagctagaactttcagttagtgagcggtagtagtatctcccccttcttaatccctactatactccgtagattaattctaagcatccttttgtttccattatctacgctgctggtttgatgaaattcctgtgttgtattcagctgcattgggatcattgctcagcctttggtcatgtctctcactggaatcaatgtgtcatgtctgtcttgcaatcacttcgatctggtattctattggtcagtctaatgagtgtaccttctagtactcagttttgtctgaattgtttcacaggcaaacagaaaaggcatacttttctccgttcaaatatagtaatctagtactccctcagttttcgtttcataacgtaagactttctaatattgtccatattcatatgggtgttaataaatctagatacatatgtgtgtctagattcattaatatttatatgaatatgggtaatgctagaaattcttacgttatgaaacggaagaagtactagaaagtcttacgtactctatggtgtgtctaacctagtagtagattgctactccctccgtccctaaatatttgacgccggtgattttttt

SEQ ID NO: 119 - DNA, 6720 bp, Oryza sativa
  misc_feature (1)..(6720): AY250075 5'-regulatory sequence engineered
  misc_feature (1)..(6720): n is a, c, g, or t
  misc_feature (370)..(370): n is a, c, g, or t
gaaatggtttcattttgggacaagttattgtgctaaaaatagctattctagaaagataaaatttgaataagatgaattttttttaattgagagagtaattggggtaagacgaagagaaatttgaatgagataggattgaagtgacaagtactagtactctagaattgcatgcactgatttgaaaataaatttagattctgaaattgtgcttactcctttcgtaaaaaaaaactaacctatgattagatgtagcatatccttacaacaaatttgtacatgaacttatccaaattcattgtattaggatatatcacatccaatagtagatttggttttttttttggaccgggggggttatttgaaatggagncagtacatgactaatgacatctctcggtggctttttttttttcaaacaataaaaatttctacaagtgatgttgaatcctgttgtactccctcttttccataaaatcaatctaaaatggatggaatgtaagtatgtgaatgaatctaatataattttgtaccacgttgcgtggtggctgaaaggataacaccagacatggggacagacatacatactactactagtactccctccgtaaaagaaaagaacaaatctaagattggatgtgatattttctagaacaatgaataatagaagcttgtccagatttattatactaggaaatgtctcatcaaatactagattggtttttttttacggaggaaatatttaattattatagattaccatgttcaatcttttcatcaacaacaaaaatgtcaatggagtaatcgacggcaatccccggcagctataggccttgtttagttcccaaattttttttccctaaaaacattatatcgaatctttggacacatgatagcattaaatatagataaaaaactaattgcaaaagtttatatggaaatcgcgagacaaatcttttgagcctaattagtccataattagccataagtgctatacattaaccccatatgtgctaatgatggattaattaggcttaataaattcgtctcgcggtttccaggcgagttatgaaattagttttttccttcgtgtccaaaaacccccttccgacattcggtcaaacgtccgatgtgacacccagaaattttcttttcgcgatttaaacacatatataatagtagagtcaaaatatgccaagttggaatgaaaactttgcatgtcactttattaattattccactctcttgaggatctgaaacatacatagtatttattattataggggtgttcccatgttcaataatcttttcatcaacgagtacaatgtcaatatggatcagtaatcgacggcaagaccggggcaggcagctaggccggggaagaaaggaatctgcgctgcagtagcactctctgacctgtgggccccctacccccctcatctctctccaacgtacccacacagcgtcccacctcgccgccggagccaatgagagatcgacgacgatcgacgtctaccagtccacgaacgagtacaattcgccataaataaatagggcgccacacccctcagctcgatcccctagctctcgatcggctgcaagaagctatagctagcctagctcatctcgccggagaagaagctaaggcagcaggcagagagagagagagagagagagagagagagatgaaggggagggggaaggtgcaggtgcggcggatcgagaacgaggtgagccggcaggtgaccttctccaagcggcggccggggctgctcaagaaggcccacgagatcgccgtcctctgcgacgtcgacgtcgccgccatcgtcttctccgccaagggcaacctcttccactacgcctcctcccacaccacgtacgtcactatcactactcctgctgcattttccatacaatacgtacaaaataacaaaagcagtagatatatatagttagctcaattaatatgatggattatttcagaaacatttaacttctctctctctctctctctctctcttccctggcatgcatcgtccatgtatcaaattaaaagatgatcaagaatgcaatgtgaaaaatatataacaacccgtgtacacctgtgagtttacaaatacaagcatttcaagcgttcataatttatccatccataaatataagtgttacaggatatactacttattctatcgtctatcacccttctttcaaacttcctccggatgcatgcatatcgatccctcattcaacaagggatattttagtcgctaaacaaattataaatacctatattaattcatcgatagagggggagttagcaagtactccctctgtcccacaatgctggtcgtccaaggaatgtagagaaaataattgctctggatgaaacttaccaggatgccccaaaacattagttgcagtagtcattttaacacaagtacaccagccacataatggtgccatacacctaatttgaatgctttggcacctagaaatttgacaggagcactagatggtgctagggatgaaaacggagcggatacggacggataatgctcataccatattcgttttcatattttttaccggatacgaaaacgaatacggatagctcgaatacggaaacaaatacggattatctcgaatacgaataagaatcgaatatgatcggacacgaatacggaaacaaatttttctcgaacacgaaaaccaactcaacttctaatggaaacaaatatcaacatatataattagctcattttatataaaatgaggtataatttataaatattttttaaaatttaaataatattaatagtatggactagtgttaagagataaactactattaaaatctataaacgtatattgaaggtcatagagttagaaagaaatggggtatgtctcatgggtcctgcggatatccgaatagcactgttcaccggatatccgaattattatccgtatccgacagaaaccttggtaccatatttgtattcgtatccgggagaaaatatccgtattcgtatccgtatccgaactatccgagaattatctgatccgaaaggtatccgtatccatttttgtccggagcggacggaaactatccgctccgttttcatccctagatggtgccacttttctgcgccattattactgccgatgggcgagtacaacgtcaaccattctaggatatttgttagccagtaaaacgatctcctttgtgggagggaggaagtagacattgtacacttcatagggcctgtttggagaactatctcagggatatttttttgctaaagattatcccaccaaaatagccctcttgctgtttggatccaagggctatttagctattattgtaccatcccaatcatttgtctccactaaaagtatacaacagccggatcttctatagctaatccaatacaggcacatacaagcatacacaattccttacaagcacaaactcataatttgtctcaaatgtataagcaagtccgtaaaataattgcacgccaaccgcggcccccacgtccgcggtcgcggccacagttggttgccaaggcgcgttgccgacggcgacccattgcccctgatgaggagctgcctcgcccagggctgccgccgtctatgcccgatgactacccaccttttccaccgtgtccagcacggtcacctgccgcgccgaagttgagccggcgggagcgcggtgcaccacgagacggcccggcgggcgcgtggtgcaccacgagacggcccggtgccctatcgaccagcccttactcccagagagcgtggtgcgcggatgggagggagaccggagcctcggccatgcccagctccttcctcgccgccaccctggaggaaggcactgtactcgtggaggtgagggaactcctggcccgacgacgcctgggtgttgaggtccagcgtgtccacgccggtgcggggaacggatccgtgggaagggccggacgccgacggctgcgagggccaaatgttgccggcggcggacgaaatgggatcttgggagaagaaatcgaagccgttggggtccatctccgcgcggattcggtgcacagcgatgcgtcgacgacggatctgatggccggcaacgcgggtggggtgagttgccagtgtggatgcctctcggtggatctgaaggaaggggcagcgcgattcgagggagagggcggcgcgggtgaagggccgggcggcggcgtgggtggggggagggggaggagaagctagggccgggcggcggcgcgggtgtggggagggggaggcgaagctgggccgggcggcggcgagggttctagagagtgagcgggggcgacagcgagcgggggcgaaatgcgatgggttttgccgcaacgggatcggcacaagtgggggaaagtgggaatcggtggggcccacagcaaaatagccccaattagcacccggtgggggtgataattttttggggtgggctatttgcaaatagccctaaaatagccctcctgtttggatccccttgagctattttggggttaaaaggggtgggctaaaaaatatccctaggatccaaacaccgccatagaacgatattatgcatagagattctccttactatcttgtaccaccggtaagtacacggcaataatttgctgagccagctttatttcctcttatgggaactgttatacctgcccaggggtactatttttggtagatgcatgtcggccccattcttctcttgtcctagtatatgcagtattaccttagtcctattgcatatactacattcgtcctattttaagtgcatctatagtttttcgtgcctaacttcgattgttgtcttatttagaaaaaaaaattaaaaatataagtcacacataagatacttatcatgttttatcatcttataacaataaaaatactaattataaaaaaaatttaaataagacggacgattaaaattggacacgaaaactcatgggctacactaaaacgagacggatagagtagtattaatagagtagtattaggaacagccttttgacttgtctacggcaatgcacaaatagtaatcaatataatctaatcatatcttttattgataggaacaattgtttgcacagtactgatatatgtatattttttttcatgttatttcagatcatatacatgaaactcataatcaaccttctattctgttgatttatataattaataatttgaatctgtagacaatccagatcatgctatatggagtataacattattaattgcctctttgtaaataaccattatcagaactatatattcatcttcaaactttgatcactactcgttctttaaaagacaaatacttaaaaatgtattatcaaagtgtgccgcattaatcgtgaaatagttttcgtttatcatagtctaaccatttgcaagatattagatgcatcctcttgttttctctcaatccctccaactcaactcaaattgtactcagtgatgccattccttttacacaattaattgcatgatgttacacttacacaccattgtttacgccctaacgaaactaatgtgtagtgcacgtaaaacgaagcgattcattagcgcataattaattaagtatttagttttttttaaaagggattaatatgattttttttaaaacaactttggtgtagaaattttttttaaaaatgtactgtttaatagtttaggaagcgtgcgcgcggaaaacaagaagaaggaagttaggaaccgaagtaacaaacacaaccttagggcactcccaaccctccacctagtatgatgtctatggcattaactacattgccatgtaggacttttagcttatgtggcactatattaattaagagagagggagtgaagagaggaagaaactgggtctcatgcaagacacagcttcaacacgagaacctatgcactagacactatcaagttttgcattgggagagaatagtgtcttcataatagatgaaaaataaatatgattggtagagaagagatatgatgtatttattaatggtctattattttaagaaagcatggattatatagtgtagtgtgatttcttattgacatggcaccatagacactgcttatggacaatatggattgggactgtctttaatccaatcaaaccaaggccaccccgtgaatgttcactgcatacgcatagcactattcacatgagacagacccatgcctgggcctaccaaccgtcacatattgatctggaaggacatgcactattcagcgcgtgtgagatgcccaatcaaagaaataactgaaattgatgtagataatttgtttacttaaacaccgtgggaacgctggaaagttaggggtgccacgtcagatgttacttttgtaaaaaagcccccgcagttctgttaattatgcattggtccccgctgataatttatagtataaattagctaggtttggctatcgttgagcattggccgaaattctattctattaactaaacaaattagctaggtgacttgaagtgaagtgagtgtactcaccatccaattatagttaattagggtctgtttattttgttgccactttcgattcattaatattcatgtgtgagggcgggaatattgtgaacattttaagttagttttttttattagaggaagtatatcctaataattgattctcatattttattgatagtatcgagcgccaccatgg

SEQ ID NO: 120 - DNA, 671 bp, Oryza sativa
  misc_feature (1)..(671): AY250075 3'-regulatory sequence engineered
  misc_feature (1)..(296): 3'-untranslated sequence
  misc_feature (297)..(671): 3'-nontranscribed sequence
aagatgttcagatgaaatggtccctgcagccattgcatggttgctgaataatgtcgtcccagatggttaggcaagcaacctagctagaactttcagttagtgagcggtagtagtatctcccccttcttaatccctactatactccgtagattaattctaagcatccttttgtttccattatctacgctgctggtttgatgaaattcctgtgttgtattcagctgcattgggatcattgctcagcctttggtcatgtctctcactggaatcaatgtgtcatgtctgtcttgcaatcacttcgatctggtattctattggtcagtctaatgagtgtaccttctagtactcagttttgtctgaattgtttcacaggcaaacagaaaaggcatacttttctccgttcaaatatagtaatctagtactccctcagttttcgtttcataacgtaagactttctaatattgtccatattcatatgggtgttaataaatctagatacatatgtgtgtctagattcattaatatttatatgaatatgggtaatgctagaaattcttacgttatgaaacggaagaagtactagaaagtcttacgtactctatggtgtgtctaacctagtagtagattgctactccctccgtccctaaatatttgacgccggtgattttttt

SEQ ID NO: 121 - DNA, 2478 bp, Oryza sativa
  misc_feature (1)..(2478): L37527 5'-regulatory sequence
  misc_feature (1)..(2003): 5'-nontranscribed sequence
  misc_feature (2004)..(2311): Exon
  misc_feature (2312)..(2462): Intron
  misc_feature (2463)..(2478): Exon
gccaagagagcccccttgctgctggtgggggagtatttatactcccacccaccaaaactagccgttgggggcgaaatcccccaactctgtgctctgtcggtctgaccggaggtatgtggccggtcagaccgtgctactctgcaacggctagaaaactagccgttgtagccctgtcagagggccccatcggcctggccggtcagaccggcatggggtggccggtcagaccggcctcggctcggtcagaccgccatcagttcggtctgaccgaatacggcttcgtcggctctgtatcggccatcccgagcagcaccatctcggcctccagggggccggtctgaccgggaaagtgccgccggtcagaccgtcactatgtagccggtctgaccggccagggcacgctggtcagaccgccactatgtggccggtctgaccgcccctggtcaggccgaacccagtgaatttgcaagtgaatgtgtgtgtaatgaaaaagagagcacaaatgaaaatgcaatgacctaatgtggcaattaaaatcatctctttgctaggtcattacccctcttaatagtacggcgaaactaaaattaaactggcaaatttgatcgccctacacctcgatcaattctaaattaaagcgctagttttaccgtcttctttccctttgctttgcgccgtcaattttaatccatcgataatcatccatgcgcacatatgacgtggacctaacttaaaatatatagctcaaagacaacggttagtccacaattaatgcttgtcattaattaccaaaattaacaccgggggcctagatgcttcagcggtggcacggcgaagtggcggccggggaagcggcagcggctgagccggctggcggctttgcgttttttctctttttttttaagaatttgtgatctatgtataggttgagatgaagaatttgtgattcattgcatgaattgagatgtataatttcttttttagaatctgtgattcattgcatgaatctgagatgtatatgatttgtgtatttgggatgtttatttgatttggggtttgatttgggatctataatctgtggtgtatatgattgatttgtgtatttgggatgttactttgatttggggtttgatttaggaatatgcatcccacataatttgggagaaaataaattagagattgagtagtaagtagcaataaatgaaaataaaaaaactaaccaggactgcctctcccatctttagtcccgagtatttgaatcgggactaaggccctgtttgattcagcttaagattattataatctggattattaggagtaagctgaaacaaacaagtagattattatgctatattattataatatataagtcagattactataatccaataatctcctctagggaagctttttccatattattgagtggctaaagacccactatccttagatgcctctaataatccagagaaacaaacaactcgtagcttattttatattagcttattataattcagcttagagcaatctgatttaataatctagattacaataatcttaagctgaaacaaacagggcctaaagatagggatctttagtcctgaattcgtagtcccgaaactacaaggggttacgaaccgggactaaaaacaatttctccactagtggatgctcaccatgtgtcattctcatttccatctcagtcccacgcaaaccaggtcagctcaagctcaagcaccgagccctacccctacgtcgatcgatctgcacggactgcacccggtcgaaacgtagccaggcaatggcgcaatgcaccacgcgagagagagagagagagagagagagagagagcagtttccatttccggcgctccagccctgccccaccgcgaaagcccccctcacctccattccttccatggcggcctccctcctcctcctccactgcaccctcctttactactccactccaaccatggcgtccagtcgtccacaccccccaccatccccaccttaaagaccggaagaacggcaactccccaaccctcttgtttcttcgagagcgaggtgaagatttgtttcttggtttgtgttcttggagtggaggaggaggaggagttggatatggggcgcggcaagatcgagatcaagaggatcgagaactcgacgaaccggcaggtgacgttctcgaagcgccgcgccgggatactcaagaaggcccgcgagatcggcgtgctctgcgacgccgaggtcggcgtcgtcatcttctccagcgccggcaagctctccgactactgcacgcccaagaccacgtccgtgtttcccccgtctctctctctcctcttccttgtttttttttcttttcttcttttcttgctcttaatttcagtgtttcctgagatatgcatgttctctttgcattgtgtttggcctttaatttgatttgtttttttggcgttttaggctgtcaaggatcttg

SEQ ID NO: 122 - DNA, 976 bp, Oryza sativa
  misc_feature (1)..(976): L37527 3'-regulatory sequence
  misc_feature (1)..(459): 3'-untranslated sequence
  misc_feature (460)..(976): 3'-nontranscribed sequence
taggctgctgagcactgccaatttggctgaacctcctgcttgctagctttgcatttcctcatgcgctgctagatgtatctgtggtttctctcatgcctgtctgaatgaactcacactgatgagagggtgtcagttgttttgtgctcctcccagcattagcactcagaattcagaaatgactcaatgtcagttgcttttgtgcttctcccagcattagcactcagaattcagaaatgactcaatgtcagttgcttttgtgcttctccctgcttgtttaattagccactgttcttgtttccagatggtgaacagtcagtttgtattatctagttatcttggcaaggatcagtaaaattcacaagtagcagccaactctgataataattccatctgtttcatcgcttggaatgaattgtatgggaaaaaaaaatcaatgcaaatcaagagataacgaaacatatgattctggagttcaattgaccagaatttgcaagagcactacatccatatcggctattgttcttatctagtaggctgtatgattcttgaattcgccaagaaaaagatcacctcctcctacatcacctgagcatgtcgccattgtcaatgaacgggccactgaacgccggcgaggcgctgaagttgctcccggcctcgctgaacatggcgctgtgcccgtacggcagcggccggtccggcagctccgggatgtccatgtccccctccagcatcttcaccgcctcggtgatggtcggccggagcgccaccatgacgtgcgcgcacaggatcccgacgagcacgaacctctccatggcgccgccccgggggctgtccgcagtcgacagcgcgccgtcgagcacctccctcgcctgcccggccttgacgtgcgcccacgcccagtcggtgatcagcacggggcccgacggcgccgacatgtccaggacgcgccgcgcgctcagcacctcgagcaccagca

SEQ ID NO: 123 - DNA, 2479 bp, Oryza sativa
  misc_feature (1)..(2479): L37527 5'-regulatory sequence engineered
gccaagagagcccccttgctgctggtgggggagtatttatactcccacccaccaaaactagccgttgggggcgaaatcccccaactctgtgctctgtcggtctgaccggaggtatgtggccggtcagaccgtgctactctgcaacggctagaaaactagccgttgtagccctgtcagagggccccatcggcctggccggtcagaccggcatggggtggccggtcagaccggcctcggctcggtcagaccgccatcagttcggtctgaccgaatacggcttcgtcggctctgtatcggccatcccgagcagcaccatctcggcctccagggggccggtctgaccgggaaagtgccgccggtcagaccgtcactatgtagccggtctgaccggccagggcacgctggtcagaccgccactatgtggccggtctgaccgcccctggtcaggccgaacccagtgaatttgcaagtgaatgtgtgtgtaatgaaaaagagagcacaaatgaaaatgcaatgacctaatgtggcaattaaaatcatctctttgctaggtcattacccctcttaatagtacggcgaaactaaaattaaactggcaaatttgatcgccctacacctcgatcaattctaaattaaagcgctagttttaccgtcttctttccctttgctttgcgccgtcaattttaatccatcgataatcatccatgcgcacatatgacgtggacctaacttaaaatatatagctcaaagacaacggttagtccacaattaatgcttgtcattaattaccaaaattaacaccgggggcctagatgcttcagcggtggcacggcgaagtggcggccggggaagcggcagcggctgagccggctggcggctttgcgttttttctctttttttttaagaatttgtgatctatgtataggttgagatgaagaatttgtgattcattgcatgaattgagatgtataatttcttttttagaatctgtgattcattgcatgaatctgagatgtatatgatttgtgtatttgggatgtttatttgatttggggtttgatttgggatctataatctgtggtgtatatgattgatttgtgtatttgggatgttactttgatttggggtttgatttaggaatatgcatcccacataatttgggagaaaataaattagagattgagtagtaagtagcaataaatgaaaataaaaaaactaaccaggactgcctctcccatctttagtcccgagtatttgaatcgggactaaggccctgtttgattcagcttaagattattataatctggattattaggagtaagctgaaacaaacaagtagattattatgctatattattataatatataagtcagattactataatccaataatctcctctagggaagctttttccatattattgagtggctaaagacccactatccttagatgcctctaataatccagagaaacaaacaactcgtagcttattttatattagcttattataattcagcttagagcaatctgatttaataatctagattacaataatcttaagctgaaacaaacagggcctaaagatagggatctttagtcctgaattcgtagtcccgaaactacaaggggttacgaaccgggactaaaaacaatttctccactagtggatgctcaccatgtgtcattctcatttccatctcagtcccacgcaaaccaggtcagctcaagctcaagcaccgagccctacccctacgtcgatcgatctgcacggactgcacccggtcgaaacgtagccaggcaatggcgcaatgcaccacgcgagagagagagagagagagagagagagagagcagtttccatttccggcgctccagccctgccccaccgcgaaagcccccctcacctccattccttgcatggcggcctccctcctcctcctccactgcaccctcctttactactccactccaacgatggcgtccagtcgtccacaccccccaccatccccaccttaaagaccggaagaacggcaactccccaaccctcttgtttcttcgagagcgaggtgaagatttgtttcttggtttgtgttcttggagtggaggaggaggaggagttggatatcgggcgcggcaagatcgagatcaagaggatcgagaactcgacgaaccggcaggtgacgttctcgaagcgccgcgccgggatactcaagaaggcccgcgagatcggcgtgctctgcgacgccgaggtcggcgtcgtcatcttctccagcgccggcaagctctccgactactgcacgcccaagaccacgtccgtgtttcccccgtctctctctctcctcttccttgtttttttttcttttcttcttttcttgctcttaatttcagtgtttcctgagatatgcatgttctctttgcattgtgtttggcctttaatttgatttgtttttttggcgttttaggctgtcaaccaccatgg

SEQ ID NO: 124 - DNA, 973 bp, Oryza sativa
  misc_feature (1)..(973): L37527 3'-regulatory sequence engineered
  misc_feature (1)..(456): 3'-untranslated sequence
  misc_feature (457)..(973): 3'-nontranscribed sequence
gctgctgagcactgccaatttggctgaacctcctgcttgctagctttgcatttcctcatgcgctgctagatgtatctgtggtttctctcatgcctgtctgaatgaactcacactgatgagagggtgtcagttgttttgtgctcctcccagcattagcactcagaattcagaaatgactcaatgtcagttgcttttgtgcttctcccagcattagcactcagaattcagaaatgactcaatgtcagttgcttttgtgcttctccctgcttgtttaattagccactgttcttgtttccagatggtgaacagtcagtttgtattatctagttatcttggcaaggatcagtaaaattcacaagtagcagccaactctgataataattccatctgtttcatcgcttggaatgaattgtatgggaaaaaaaaatcaatgcaaatcaagagataacgaaacatatgattctggagttcaattgaccagaatttgcaagagcactacatccatatcggctattgttcttatctagtaggctgtatgattcttgaattcgccaagaaaaagatcacctcctcctacatcacctgagcatgtcgccattgtcaatgaacgggccactgaacgccggcgaggcgctgaagttgctcccggcctcgctgaacatggcgctgtgcccgtacggcagcggcccgtccggcagctccgggatgtccatgtccccctccagcatcttcaccgcctcggtgatggtcggccggagcgccaccatgacgtgcgcgcacaggatcccgacgagcacgaacctctccatcgcgccgccccgggggctgtccgcagtcgacagcgcgccgtcgagcacctccctcgcctgcccggccttgacgtgcgcccacgcccagtcggtgatcagcacggggcccgacggcgccgacatgtccaggacgcgccgcgcgctcagcacctcgagcaccagca

SEQ ID NO: 125 - DNA, 2443 bp, Oryza sativa
  misc_feature (1)..(2443): L37528 5'-regulatory sequence
  misc_feature (1)..(1967): 5'-nontranscribed sequence
  misc_feature (1968)..(2098): Exon
  misc_feature (2099)..(2429): Intron
  misc_feature (2430)..(2443): Exon
accacctcaatctccactgtttgattggacgtttaggtttcatatcaccaaggttcaatcagtgtggagtacttttcagtccttctggcctgtgccaaatgtagaaggagagccttttctctgatttgatccattcttgcaagctacaggtaagttgatttgattccacatagaattatttttcttctttgtttttccatgccttttcttctctgtcataaactcctaatttagctactataattttttcagtgaatcctagctaagagttagtttattgttctttttaggtactgaattttggtacatactagcaaattgtcatatacagcaacaaggatctagtggcatgagactttggcaagtgttcttgcagaaaccaaaatcagagctgcctccatttggctgaataattctggccatttctaaccgttcctcattgcttttctccttatgcatatactggaaaggtagctctgcaaaagtcaggtagacaataacactagaagcagttatatatgcttgcaaaaattcacaacctttccaaacaaaatttatttcttacaccattccaccaggaatggaatttcaatactaccttgccaagtgcagttacaaaatgttcaccaaaacgtccaaaccttcgctgcaactttaatttggacataattcatatatacttgctagtatagcaacaggaatgctgcatagtgacaacacatctaggatcatgtcccaactctgatagatccattacaccaacctatcttgagacagtgccaatgcaggaactaacctctcatggaaatgcatggtagctagctccacaatgtgacacatgtaagtctcaagttcaccgtgcgaaaaatcacgatgcgcgaatcgcccccccaatttcgacaggtaagggtagatcttcatcgatcggccagttgaaaacaacaacggcggtacaacgatcggccatcatcgtgcaccgcaccgcggcggtggcccagagccggtgatggggatgtatggacggtggagtgagtggagagagggttggcagcaagcatgatgcatcacattatgtgaggaagagataggggccccatgagagcaactgaaaggactgtgctgaattaataggaggctgctgctggtgagtacttagccattatctctgcatcctatgtgacaaacagaaactggacagtgtatgtggagtgtcacatggttgtatatacatcatacattaaatcatctctatgctgtatatatagatttgctttgtttttactctctgatgatctgatcggtagaataaagcaactagttatcagttattatatatcacacaaattaaataggaaagtaatttgatttgctgaattggaaactacagtaaaacttgttaggtgagttctgaaaaaaaaagtgcatctgctgaacttcattggcaaaacaatgtaaagcccttggcattaacatctgtaacattgtctcagatatatcagcttacaaggttcctgaactgtgaaaagtgaaacaaaaaggaggaaagcaataaccggtcttgctgttcccacaactgtttttttgtgtctaacatgcagtttaccagtccaaacaaagcaagtttcagacttacagcaacaagaagcaaagctttgcaagcagagttacatcagagttacttgcattacatattctgaggtaaaatggatatggagacatatgtatctgacagcacagcactgcctgccaggacaagagatcaaagagtaaagactgatggaaagagagctagctagtagtaaatcagaaaggttgtggattgcagtcagaagaaacaacaagctagagatagatagctatcagattggaattggccacaaaagctactgctaactacattcacctcacatttcttcttcccctttccctcctcctcctcttcttcctcttcttctcccccacctctctctttaatacctctcctcctcctgttgctgcttctgcctctctcacatcttctttctttccttctctggatctcttccatcttcagaagagagagcactagttagcatacccatccatgatgaacatgatggtaaattctggctttcttgcttttggataaattttgcttcctttcttaacttgagcacaagcttgtgttatatgtggtgtggaatcttggttgccatgttgtgaggatttagctagagagtcaagaaagaggaatatatgctttatgtagataggagtaggatctctgggtctttaaacatcaccatgacaagcaaagataagaacaggagagcagttcttgattattatttttcttctcatcaagaaattaagccggagatagacatggcagctgcacgcagtgattcacttcttgatttcttgatttgggttgttgcgtttgtgtccagaccgatctgagctg

SEQ ID NO: 126 - DNA, 1435 bp, Oryza sativa
  misc_feature (1)..(1435): L37528 3'- regulatory sequence
  misc_feature (1)..(31): 3'-untranslated sequence
  misc_feature (32)..(439): Intron
  misc_feature (440)..(869): Exon
  misc_feature (870)..(1435): 3'-nontranscribed sequence
tagttttggtgtagacaccgtacgtacacacgtacgttaggtaaataaaacactcagtactgtagatttatacctacacaaaagtatatatttgcagagtataatccagttaggcaagttgatatttaccctctgctatttttacataactgccagcggatactatttactttcgaactttggcaactcgtctttggaaatgataaaatgttattaaagtgtgctatatcttaaatacaagcatcggacttttgttcactttggtctaacaatttgagagaaaacaatgttcaatattcaaatggaaagtaaatgttgtcagttatttagaaacgaagggagtatatgtattactggcattcatcttaataattaactcagtaactgtttcttacatctcttgtagttgaaatctgaaagtgtgttgtatctgttgcagatgaaatctgaaggcgtcgatacccgcggctacgtaacagcgtgatcaacctgaagaaatcgatgcagtaattctatgtgttcgtcagatcatcataaccagtattgtcattaggcgttgtgaaaaaaaaatgtgtcagcatgcattgcaagctagcgtttgtggctgctcatcagctgcatgcgtaattgcgtacgtgcacaaattaaacagaccttgccaccattgtgccatattgtgtgtgttgtatgatatatatatatatatatatatatatatatatatatatatatatatatatatatatatatatatatatatatatatatatatatatataaacagcacgtttgtgctctgattcgtgtaactgatcagcagatcaaactctaccactgccgatatatatgtgaggaccatggattgatgcattgtcgttgatcttcatgttgtgtcttcatccgtttcatattataaaacgtttgactcttttcctagtcaaactttattaagtttatagaaaaatttaacatctaaaatatgaaattaatatcattaaatctaacattgaatatgttttcataatatgtttgttttgtgttgaaaacattgttatattttctataaatttgattaaatttaaagatgtttaactaagaaaataatcaaacgaacttataatatgaaacgagggagtattatatatctacggtctttgctagaattttgattttacacgtactggttctgttgaaaattactatatatttgcaaatcaacctggcgtgcatgtgtcaaccattcagatcatgcatggaactatgcaagacaggaggtactgtgatgaatatgtcccaaaattatatattcatatatatatgtgtacccactcacgaaaatttgttattcggtgttgcttttaaaacatatatgttattcgacaagttggcgtttcaaaattttaagcacaaatacaaggctaaaatgtagctttca

SEQ ID NO: 127 - DNA, 2444 bp, Oryza sativa
  misc_feature (1)..(2444): L37528 5'- regulatory sequence engineered
accacctcaatctccactgtttgattggacgtttaggtttcatatcaccaaggttcaatcagtgtggagtacttttcagtccttctggcctgtgccaaatgtagaaggagagccttttctctgatttgatccattcttgcaagctacaggtaagttgatttgattccacatagaattatttttcttctttgtttttccatgccttttcttctctgtcataaactcctaatttagctactataattttttcagtgaatcctagctaagagttagtttattgttctttttaggtactgaattttggtacatactagcaaattgtcatatacagcaacaaggatctagtggcatgagactttggcaagtgttcttgcagaaaccaaaatcagagctgcctccatttggctgaataattctggccatttctaaccgttcctcattgcttttctccttatgcatatactggaaaggtagctctgcaaaagtcaggtagacaataacactagaagcagttatatatgcttgcaaaaattcacaacctttccaaacaaaatttatttcttacaccattccaccaggaatggaatttcaatactaccttgccaagtgcagttacaaaatgttcaccaaaacgtccaaaccttcgctgcaactttaatttggacataattcatatatacttgctagtatagcaacaggaatgctgcatagtgacaacacatctaggatcatgtcccaactctgatagatccattacaccaacctatcttgagacagtgccaatgcaggaactaacctctcatggaaatgcatggtagctagctccacaatgtgacacatgtaagtctcaagttcaccgtgcgaaaaatcacgatgcgcgaatcgcccccccaatttcgacaggtaagggtagatcttcatcgatcggccagttgaaaacaacaacggcggtacaacgatcggccatcatcgtgcaccgcaccgcggcggtggcccagagccggtgatggggatgtatggacggtggagtgagtggagagagggttggcagcaagcatgatgcatcacattatgtgaggaagagataggggccccatgagagcaactgaaaggactgtgctgaattaataggaggctgctgctggtgagtacttagccattatctctgcatcctatgtgacaaacagaaactggacagtgtatgtggagtgtcacatggttgtatatacatcatacattaaatcatctctatgctgtatatatagatttgctttgtttttactctctgatgatctgatcggtagaataaagcaactagttatcagttattatatatcacacaaattaaataggaaagtaatttgatttgctgaattggaaactacagtaaaacttgttaggtgagttctgaaaaaaaaagtgcatctgctgaacttcattggcaaaacaatgtaaagcccttggcattaacatctgtaacattgtctcagatatatcagcttacaaggttcctgaactgtgaaaagtgaaacaaaaaggaggaaagcaataaccggtcttgctgttcccacaactgtttttttgtgtctaacatgcagtttaccagtccaaacaaagcaagtttcagacttacagcaacaagaagcaaagctttgcaagcagagttacatcagagttacttgcattacatattctgaggtaaaatggatatggagacatatgtatctgacagcacagcactgcctgccaggacaagagatcaaagagtaaagactgatggaaagagagctagctagtagtaaatcagaaaggttgtggattgcagtcagaagaaacaacaagctagagatagatagctatcagattggaattggccacaaaagctactgctaactacattcacctcacatttcttcttcccctttccctcctcctcctcttcttcctcttcttctcccccacctctctctttaatacctctcctcctcctgttgctgcttctgcctctctcacatcttctttctttccttctctggatctcttccatcttcagaagagagagcactagttagcatacccatccatcttgaacatcttggtaaattctggctttcttgcttttggataaattttgcttcctttcttaacttgagcacaagcttgtgttatatgtggtgtggaatcttggttgccatgttgtgaggatttagctagagagtcaagaaagaggaatatatgctttatgtagataggagtaggatctctgggtctttaaacatcaccatgacaagcaaagataagaacaggagagcagttcttgattattatttttcttctcatcaagaaattaagccggagatagacatggcagctgcacgcagtgattcacttcttgatttcttgatttgggttgttgcgtttgtgtccagaccgatccaccatgg

SEQ ID NO: 128 - DNA, 1432 bp, Oryza sativa
  misc_feature (1)..(1432): L37528 3'-regulatory sequence engineered
  misc_feature (1)..(28): 3'-untranslated sequence
  misc_feature (29)..(426): Intron
  misc_feature (427)..(866): Exon
  misc_feature (867)..(1432): 3'-nontranscribed sequence
ttttggtgtagacaccgtacgtacacacgtacgttaggtaaataaaacactcagtactgtagatttatacctacacaaaagtatatatttgcagagtataatccagttaggcaagttgatatttaccctctgctatttttacataactgccagcggatactatttactttcgaactttggcaactcgtctttggaaatgataaaatgttattaaagtgtgctatatcttaaatacaagcatcggacttttgttcactttggtctaacaatttgagagaaaacaatgttcaatattcaaatggaaagtaaatgttgtcagttatttagaaacgaagggagtatatgtattactggcattcatcttaataattaactcagtaactgtttcttacatctcttgtagttgaaatctgaaagtgtgttgtatctgttgcagatgaaatctgaaggcgtcgatacccgcggctacgtaacagcgtgatcaacctgaagaaatcgatgcagtaattctatgtgttcgtcagatcatcataaccagtattgtcattaggcgttgtgaaaaaaaaatgtgtcagcatgcattgcaagctagcgtttgtggctgctcatcagctgcatgcgtaattgcgtacgtgcacaaattaaacagaccttgccaccattgtgccatattgtgtgtgttgtatgatatatatatatatatatatatatatatatatatatatatatatatatatatatatatatatatatatatatatatatatatatatataaacagcacgtttgtgctctgattcgtgtaactgatcagcagatcaaactctaccactgccgatatatatgtgaggaccatcgattgatgcattgtcgttgatcttcatgttgtgtcttcatccgtttcatattataaaacgtttgactcttttcctagtcaaactttattaagtttatagaaaaatttaacatctaaaatatgaaattaatatcattaaatctaacattgaatatgttttcataatatgtttgttttgtgttgaaaacattgttatattttctataaatttgattaaatttaaagatgtttaactaagaaaataatcaaacgaacttataatatgaaacgagggagtattatatatctacggtctttgctagaattttgattttacacgtactggttctgttgaaaattactatatatttgcaaatcaacctggcgtgcatgtgtcaaccattcagatcatgcatggaactatgcaagacaggaggtactgtgatgaatatgtcccaaaattatatattcatatatatatgtgtacccactcacgaaaatttgttattcggtgttgcttttaaaacatatatgttattcgacaagttggcgtttcaaaattttaagcacaaatacaaggctaaaatgtagctttca

SEQ ID NO: 129 - DNA, 3068 bp, Oryza sativa
  misc_feature (1)..(3068): U78891 5'-regulatory sequence
  misc_feature (1)..(1844): 5'-nontranscribed sequence
  misc_feature (1845)..(2126): Exon
  misc_feature (2127)..(3051): Intron
  misc_feature (2829)..(2829): y is c or t
  misc_feature (2851)..(2851): y is c or t
  misc_feature (3052)..(3068): Exon
tcttcttcttgccttcatttgagttaattacagcattgatttgtgtgaacaaaattcatcataaatcagttcctcgcgagatcattggtctcaacatgatggtgccaagtgagaactgcagtattgtgcagttttcagttttgagtctaagttgtataaacttgcagttggagtattatgctctagtattaatctactatcagacaaagataagatcactgattaattcacccctgacctgatccatcttgtgcacacgtcggccagcagcggaattgagcttctggatcagatcttaggcatcgtttggaacagagaagtttcaaagatttatgaagaatttgaattaaattcagtatagaatgcatgattgtgaaaagtacaataatatgaaaaataaaggattgagatatcatgatttaataatttattgaatactccatgtaacaaacccatagtaattgtccaaagtagatgttgggatagaaggaaaaatacagaaaacttatgattgtacggtgatttgatggagagaaaagggagagagaaagagacaacttgtagtgcaaccctaaaaggaatttgaatgaatatagttagaacttttgtggtagaaatttcttctaaaaatgtggagcaactttttcctatcctacaaaattccttcaaatcagtcctacataacctttccaaaatttcacaagaaatgaaataagcataccattccatcttgtgcacacgtcccccagtagcgaaattgagtttctaggtcagatcttgagcctcgctggaacggagaaattttaaagatttataaaggatttaaattaaatctagcatagaacgtatgaatattaaaagaaatatagaaataaggaaaacataggattgtgataccatgatttaataatttaatgagtccatgaaacaaacccatggtaattgcccaaaatagatgtttggatagcttagaaaaaaaatacagaaaattaagattttacggtgattagttggagagagaagggagagacataagttgcatcgcaattctcaaacgaagtcgaaaaatatgaggttagattttattctagaattcctctaaaatacggacgacgaaattactttgaatcaatccaacaaatctacataggaattactctttcggactcaaactcctcaattttttcccacttaaaaatccttcgccctaattaaagttcacccgttacaaatggagagcgatcgagctctcaactagcctaattcaagaggtgatgaagaaaaatggcagagaaaaagaagaagaagaagaagaagaagccgcaatcactcctagtccttacaaggttctgccgccgtggtgaggccaatggcacatactttcaggcttcagcccaccaaatggagacgccatacggcctatgctgttccaggcccaaattacaccggctaaaccccatacggcccatacatataccattcctggtccaaaaccggtgggttcccgagtagggaatcggacacggcccgactcaaacacacgcactctccaagtctcgagctccacgacgacgacgacgacgatgacgatggcgcacagggcaggggcaggcaggtcacatgtggtggtgaatggtgatggccatccatccatccaccaatgaaaaggcgagtcgtggtaaagaagacggatggacggatggatgggcatgggcggcgagcgatggacgcgacgcgacccatcctggtttcccgaaacgcgctacgctgccgagcatctagggtttcccacccggtacgaccttgccgaaaatggcacccactcaccatctcccatccttttaatccccttcctccacctcgcttgctttcttgcagtggtggtggtggtggtggtgagatctagcttggttggttggttgcagctggagatcgatcgggatggggaggggtcgggtggagctgaagaggatcgagaacaagatcaaccggcaggtgacgttcgccaagcgcaggaatggcctgctcaagaaggcgtacgagctctccgtcctctgcgacgccgaggtcgccctcatcatcttctccaaccgcggcaagctctacgagttctgcagcacccagaggttcatttcatttcctagctactctaatccatccatcaaacccacatcacatcacacttcaatttcgcaagcttaattagccaccctttcgattggatctgtcctgtccagatctgttcatgcatcatcaaaagctagctgcatctgccttttgcccggaattccagctgcatgctatgccggcttgatttctgcatacgatcttttgacaagaaacgagctgtggcgtgttcaaccgcacgctacctagctagctagattgctcttgcttccgtgggttttcacgccgggatagatctgggcaatatcctgggtttagggttttgcttcctggtccgtgtggtagatcggtgcacatctttagtttgccagttggtttccttctccgatctgtccgtcttacgtgcgatttcttcatgtgtggtctcggaactcgcaaaggaactgaaaagtttgcttatttacgaccttttcttctggatctgcaaggttctttgtttcccttagctaaatccttaaaagaagtagtccaatatatacttccatgcataatattgcaaaataaatgatggtttgttgataaccaaagtaaagagacataaaaactaactagagactttttttttcaaaaaaaaaaaggaagaatcttggtcaacggggttatatatcagtagtatatttccggggatcaagggcttcagtytactaatcaaacaatttaatcycatagggggacttgcaagaaccatatgttccatttctgaatgtattttaagctaaaatgcatgacaacgaaaaaagggcattgtggtagtaaatgtgccatgcccctattgtagatcttaatcatcgttaatctctccttcttgtgatcccatgcatgcactaattttaattaattcctcatgtcttttgaactttgtagcatgactaaaacgcttg

SEQ ID NO: 130 - DNA, 1059 bp, Oryza sativa
  misc_feature (1)..(1059): U78891 3'- regulatory sequence
  misc_feature (1)..(277): 3'-untranslated sequence
  misc_feature (278)..(1059): 3'-nontranscribed sequence
tgaacagtgcgtgcatgaacacctacatgcccccatggctaccatgatgatgacggggacaatgaattacgaaataacaaggatatgtggcatatatgtggtgccgcatacatgcatgtatcatggctagctacttaattggagtgatggatttgaactagtttcgtatgtagcctgtttgtgtgtaacttgtgtgagatactaccttaaaaactatcggtgtctgttgaacatattctgcgatcaactttaagcgtattattatcattttcattccattctgtttagttcacttgtacttgctaaatgccttaactttgctacagataaaaaaaatattactaacttgataaacacaaatatatttttctggaatatgctacttttttatagggaatattcaccttatttgattttatatgtggatatacatttacatttattttttaatattaaaaaattaagggatattttgtaaaaattttaacggggtaggtggcatgacagattcactgtcgcatccttccagcctagctatgtttttcttgtttcgtattaaagtttttttaaaaaatttctatcgcatcattaccatccttccagcgtactccctttatcgcataaaaaaacaacctagtaccggatgacacatcttgatcctattaatctggacatacatatgtatagatttatagtactaaaatatgtcacatatggttctagatttgttttttataggaccggagggagtagctatgtttttcacgtttcgtattaagttttttttaaaaaaaaaaatcttgagagtatctgagatgctatcacatagtagagtactactagtagaaacagtactgcatctgctgaaataaatagggaaaaggacacaaccaagagtgcgcagcccatgaccagttccggcccgtggaatccatgtatccagcgaattgggccgtatctgtgcgtggggcggcccatgaataaacttgtggataaatgtaggccatagttatcgtcgttttctccatggccttgcatcaaaagacaaaaaaaaacatc

SEQ ID NO: 131 - DNA, 3069 bp, Oryza sativa
  misc_feature (1)..(3069): U78891 5'-regulatory sequence engineered
  misc_feature (2829)..(2829): y is c or t
  misc_feature (2851)..(2851): y is c or t
tcttcttcttgccttcatttgagttaattacagcattgatttgtgtgaacaaaattcatcataaatcagttcctcgcgagatcattggtctcaacatgatggtgccaagtgagaactgcagtattgtgcagttttcagttttgagtctaagttgtataaacttgcagttggagtattatgctctagtattaatctactatcagacaaagataagatcactgattaattcacccctgacctgatccatcttgtgcacacgtcggccagcagcggaattgagcttctggatcagatcttaggcatcgtttggaacagagaagtttcaaagatttatgaagaatttgaattaaattcagtatagaatgcatgattgtgaaaagtacaataatatgaaaaataaaggattgagatatcatgatttaataatttattgaatactccatgtaacaaacccatagtaattgtccaaagtagatgttgggatagaaggaaaaatacagaaaacttatgattgtacggtgatttgatggagagaaaagggagagagaaagagacaacttgtagtgcaaccctaaaaggaatttgaatgaatatagttagaacttttgtggtagaaatttcttctaaaaatgtggagcaactttttcctatcctacaaaattccttcaaatcagtcctacataacctttccaaaatttcacaagaaatgaaataagcataccattccatcttgtgcacacgtcccccagtagcgaaattgagtttctaggtcagatcttgagcctcgctggaacggagaaattttaaagatttataaaggatttaaattaaatctagcatagaacgtatgaatattaaaagaaatatagaaataaggaaaacataggattgtgataccatgatttaataatttaatgagtccatgaaacaaaccgatggtaattgcccaaaatagatgtttggatagcttagaaaaaaaatacagaaaattaagattttacggtgattagttggagagagaagggagagacataagttgcatcgcaattctcaaacgaagtcgaaaaatatgaggttagattttattctagaattcctctaaaatacggacgacgaaattactttgaatcaatccaacaaatctacataggaattactctttcggactcaaactcctcaattttttcccacttaaaaatccttcgccctaattaaagttcacccgttacaaatggagagcgatcgagctctcaactagcctaattcaagaggtgatgaagaaaaatggcagagaaaaagaagaagaagaagaagaagaagccgcaatcactcctagtccttacaaggttctgccgccgtggtgaggccaatggcacatactttcaggcttcagcccaccaaatggagacgccatacggcctatgctgttccaggcccaaattacaccggctaaaccccatacggcccatacatataccattcctggtccaaaaccggtgggttcccgagtagggaatcggacacggcccgactcaaacacacgcactctccaagtctcgagctccacgacgacgacgacgacgatgacgatggcgcacagggcaggggcaggcaggtcacatgtggtggtgaatggtgatggccatccatccatccaccaatgaaaaggcgagtcgtggtaaagaagacggatggacggatggatgggcatgggcggcgagcgatggacgcgacgcgacccatcctggtttcccgaaacgcgctacgctgccgagcatctagggtttcccacccggtacgaccttgccgaaaatggcacccactcaccatctcccatccttttaatccccttcctccacctcgcttgctttcttgcagtggtggtggtggtggtggtgagatctagcttggttggttggttgcagctggagatcgatcgggatcgggaggggtcgggtggagctgaagaggatcgagaacaagatcaaccggcaggtgacgttcgccaagcgcaggaatggcctgctcaagaaggcgtacgagctctccgtcctctgcgacgccgaggtcgccctcatcatcttctccaaccgcggcaagctctacgagttctgcagcacccagaggttcatttcatttcctagctactctaatccatccatcaaacccacatcacatcacacttcaatttcgcaagcttaattagccaccctttcgattggatctgtcctgtccagatctgttcatgcatcatcaaaagctagctgcatctgccttttgcccggaattccagctgcatgctatgccggcttgatttctgcatacgatcttttgacaagaaacgagctgtggcgtgttcaaccgcacgctacctagctagctagattgctcttgcttccgtgggttttcacgccgggatagatctgggcaatatcctgggtttagggttttgcttcctggtccgtgtggtagatcggtgcacatctttagtttgccagttggtttccttctccgatctgtccgtcttacgtgcgatttcttcatgtgtggtctcggaactcgcaaaggaactgaaaagtttgcttatttacgaccttttcttctggatctgcaaggttctttgtttcccttagctaaatccttaaaagaagtagtccaatatatacttccatgcataatattgcaaaataaatgatggtttgttgataaccaaagtaaagagacataaaaactaactagagactttttttttcaaaaaaaaaaaggaagaatcttggtcaacggggttatatatcagtagtatatttccggggatcaagggcttcagtytactaatcaaacaatttaatcycatagggggacttgcaagaaccatatgttccatttctgaatgtattttaagctaaaatgcatgacaacgaaaaaagggcattgtggtagtaaatgtgccatgcccctattgtagatcttaatcatcgttaatctctccttcttgtgatcccatgcatgcactaattttaattaattcctcatgtcttttgaactttgtagcatcactaaccaccatgg

SEQ ID NO: 132 - DNA, 1055 bp, Oryza sativa
  misc_feature (1)..(1055): U78891 3'-regulatory sequence engineered
  misc_feature (1)..(274): 3'-untranslated sequence
  misc_feature (275)..(1055): 3'-nontranscribed sequence
acagtgcgtgcatgaacacctacatgcccgcatggctaccatgatgatgacggggacaatgaattacgaaataacaaggatatgtggcatatatgtggtgccgcatacatgcatgtatcatggctagctacttaattggagtgatggatttgaactagtttcgtatgtagcctgtttgtgtgtaacttgtgtgagatactaccttaaaaactatcggtgtctgttgaacatattctgcgatcaactttaagcgtattattatcattttcattccattctgtttagttcacttgtacttgctaaatgccttaactttgctacagataaaaaaaatattactaacttgataaacacaaatatatttttctggaatatgctacttttttatagggaatattcaccttatttgattttatatgtggatatacatttacatttattttttaatattaaaaaattaagggatattttgtaaaaattttaacggggtaggtggcatgacagattcactgtcgcatccttccagcctagctatgtttttcttgtttcgtattaaagtttttttaaaaaatttctatcgcatcattaccatccttccagcgtactccctttatcgcataaaaaaacaacctagtaccggatgacacatcttgatcctattaatctggacatacatatgtatagatttatagtactaaaatatgtcacatatggttctagatttgttttttataggaccggagggagtagctatgtttttcacgtttcgtattaagttttttttaaaaaaaaaaatcttgagagtatctgagatgctatcacatagtagagtactactagtagaaacagtactgcatctgctgaaataaatagggaaaaggacacaaccaagagtgcgcagcccatgaccagttccggcccgtggaatccatgtatccagcgaattgggccgtatctgtgcgtggggcggcccatgaataaacttgtggataaatgtaggccatagttatcgtcgttttctcgatggccttgcatcaaaagacaaaaaaaaacat

SEQ ID NO: 133 - DNA, 30 bp, Artificial sequence
  f primer
  misc_feature (1)..(30): AB003322-1
cgttgcccagcgaggagcatgcgtaaaatc

SEQ ID NO: 134 - DNA, 30 bp, Artificial sequence
  R primer
  misc_feature (1)..(30): AB003322-2
gatttcattcatactgtccaacagaaggca

SEQ ID NO: 135 - DNA, 30 bp, Artificial sequence
  F primer
  misc_feature (1)..(30): AB003322-3
taactgaaaggaaaaaaaaagcatccttgc

SEQ ID NO: 136 - DNA, 30 bp, Artificial sequence
  R primer
  misc_feature (1)..(30): AB003322-4
gaataaatctggcaactgaaatccaaccat

SEQ ID NO: 137 - DNA, 30 bp, Artificial sequence
  primer
  misc_feature (1)..(30): AB003322-5
cgcgcggcggcgatcgcgcgggagaggcgg

SEQ ID NO: 138 - DNA, 27 bp, Artificial sequence
  Primer
  misc_feature (1)..(27): AB003322-6
cttctgttggacagtatcaatgaaatc

SEQ ID NO: 139 - DNA, 26 bp, Artificial Sequence
  Primer
  misc_feature (1)..(26): AB003322-7
atttcatccatgctacaatttatttt

SEQ ID NO: 140 - DNA, 26 bp, Artificial sequence
  Primer
  misc_feature (1)..(26): AB003322-8
agaaggccgaggaggtctccgtgctc

SEQ ID NO: 141 - DNA, 31 bp, Artificial sequence
  F primer
  misc_feature (1)..(31): AB003322-9
taataagagctctgaaaggaaaaaaaaagca

SEQ ID NO: 142 - DNA, 38 bp, Artificial Sequence
  R primer
  misc_feature (1)..(38): AB002233-10
  misc_feature (1)..(38): AB003322-10 R primer
atatatgcggccgcggtccgaataaatctggcaactga

SEQ ID NO: 143 - DNA, 35 bp, Artificial sequence
  F primer
  misc_feature (1)..(35): AB003322-11
tatataccatggtggtgatactgtccaacagaagg

SEQ ID NO: 144 - DNA, 37 bp, Artificial sequence
  R primer
  misc_feature (1)..(37): AB003322-12
atatatggatccggaccgttgcccagcgaggagcatg

SEQ ID NO: 145 - DNA, 24 bp, Artificial sequence
  F primer
  misc_feature (1)..(24): AB003324-1
tctaaatagggcccaacatactca

SEQ ID NO: 146 - DNA, 29 bp, Artificial sequence
  R primer
  misc_feature (1)..(29): AB003324 R primer
tcaagcgtcttaagcatgctgaaatatga

SEQ ID NO: 147 - DNA, 28 bp, Artificial sequence
  F primer
  misc_feature (1)..(28): AB003324-3 F primer
ctagctagctagctaccgtttcagcttc

SEQ ID NO: 148 - DNA, 26 bp, Artificial Sequence
  R primer
  misc_feature (1)..(26): AB003324-4 R primer
tggagatcgaccacaattaaattcgt

SEQ ID NO: 149 - DNA, 30 bp, Artificial sequence
  Primer
  misc_feature (1)..(30): AB003324-5
tcgagcgggagatcgagatcgggcgaggca

SEQ ID NO: 150 - DNA, 26 bp, Artificial Sequence
  Primer
  misc_feature (1)..(26): AB003324-6
aattcatatttcagcatccttaagac

SEQ ID NO: 151 - DNA, 27 bp, Artificial sequence
  Primer
  misc_feature (1)..(27): AB003324-7
actgtgcagatgaggtcatgcgctcat

SEQ ID NO: 152 - DNA, 28 bp, Artificial Sequence
  Primer
  misc_feature (1)..(28): AB003324-8
aggcctacgagctgtccatcctctgcga

SEQ ID NO: 153 - DNA, 28 bp, Artificial sequence
  Primer
  misc_feature (1)..(28): AB003324-9
acgcgtccggccatcgctgcctagctag

SEQ ID NO: 154 - DNA, 44 bp, Artificial sequence
  F primer
  misc_feature (1)..(44): AB003324-10
atatatgcggccgcggtccgtggagatcgaccacaattaaattc

SEQ ID NO: 155 - DNA, 35 bp, Artificial sequence
  R primer
  misc_feature (1)..(35): AB003324-11
taggtagagctcctagctagctagctaccgtttca

SEQ ID NO: 156 - DNA, 39 bp, Artificial sequence
  F primer
  misc_feature (1)..(39): AB003324-12
atatatggatccggaccgtctaaatagggcccaacatac

SEQ ID NO: 157 - DNA, 36 bp, Artificial sequence
  R primer
  misc_feature (1)..(36): AB003324-13
tatataccatggtggcttaaggatgctgaaatatga

SEQ ID NO: 158 - DNA, 26 bp, Artificial sequence
  F primer
  misc_feature (1)..(26): AB003328-1
aacaaaaccaataatctccaatgccc

SEQ ID NO: 159 - DNA, 26 bp, Artificial sequence
  R primer
  misc_feature (1)..(26): AB003328-2
catcttcgatcgccgatgaaccaacc

SEQ ID NO: 160 - DNA, 26 bp, Artificial sequence
  F primer
  misc_feature (1)..(26): AB003328-3
taagtaacaggccaggaataagctgg

SEQ ID NO: 161 - DNA, 26 bp, Artificial sequence
  R primer
  misc_feature (1)..(26): AB003328-4
attgccgggctatagcctttctccct

SEQ ID NO: 162 - DNA, 30 bp, Artificial sequence
  Primer
  misc_feature (1)..(30): AB003328-5
cgtattgtcgtccatgcatgcgaaatgcta

SEQ ID NO: 163 - DNA, 33 bp, Artificial sequence
  F primer
  misc_feature (1)..(33): AB003328-6
taataagagctcgtaacaggccaggaataagct

SEQ ID NO: 164 - DNA, 39 bp, Artificial sequence
  Primer
  misc_feature (1)..(39): AB003328-7
atatatgcggccgcggtccgattgccgggctatagcctt

SEQ ID NO: 165 - DNA, 41 bp, Artificial sequence
  F primer
  misc_feature (1)..(41): AB003328-8
tatataggatccggaccgaacaaaaccaataatctccaatg

SEQ ID NO: 166 - DNA, 36 bp, Artificial sequence
  R primer
  misc_feature (1)..(36): AB003328-9
tatataccatggtggatcgccgatgaaccaaccaac

SEQ ID NO: 167 - DNA, 26 bp, Artificial sequence
  F primer
  misc_feature (1)..(26): AB077760-1
attcgttgggggtgacatgactagtc

SEQ ID NO: 168 - DNA, 26 bp, Artificial sequence
  R primer
  misc_feature (1)..(26): AB077760-2
caaagatccccttgatgctgcagcag

SEQ ID NO: 169 - DNA, 25 bp, Artificial sequence
  F primer
  misc_feature (1)..(25): AB077760-3
tgatatatcatcgccgccgccgccg

SEQ ID NO: 170 - DNA, 29 bp, Artificial sequence
  R primer
  misc_feature (1)..(29): AB077760-4
ccgtggtactgaaatcgaaaaaagaaatg

SEQ ID NO: 171 - DNA, 36 bp, Artificial sequence
  Primer
  misc_feature (1)..(36): AB077760-5
gctgcagggggcggccatcgggaggggcaagatcga

SEQ ID NO: 172 - DNA, 26 bp, Artificial sequence
  Primer
  misc_feature (1)..(26): AB077760-6
cgcacggggatcatcaagaaggccag

SEQ ID NO: 173 - DNA, 25 bp, Artificial sequence
  Primer
  misc_feature (1)..(25): AB077760-7
tcgccatcatcatcttctcctccac

SEQ ID NO: 174 - DNA, 31 bp, Artificial sequence
  Primer
  misc_feature (1)..(31): AB077760-8
atgaagaaggccagggtgctcaccgtgctct

SEQ ID NO: 175 - DNA, 26 bp, Artificial sequence
  F primer
  misc_feature (1)..(26): AB077760-11
atgcatgagctctatatcatcgccgc

SEQ ID NO: 176 - DNA, 33 bp, Artificial sequence
  R primer
  misc_feature (1)..(33): AB077760-12
atatatgcggccgcggtccgtggtactgaaatc

SEQ ID NO: 177 - DNA, 39 bp, Artificial sequence
  F primer
  misc_feature (1)..(39): AB077760-9
atatatgtcgacggaccgattcgttgggggtgacatgac

SEQ ID NO: 178 - DNA, 37 bp, Artificial sequence
  R primer
  misc_feature (1)..(37): AB077760-10
tacagtaccatggtggcccttgatgctgcagcaggat

SEQ ID NO: 179 - DNA, 25 bp, Artificial sequence
  F primer
  misc_feature (1)..(25): AB095645-1
ctcgtcgccgtcgttggctcggcgt

SEQ ID NO: 180 - DNA, 26 bp, Artificial sequence
  R primer
  misc_feature (1)..(26): AB095645-2
caagattcttgatagccttatacatg

SEQ ID NO: 181 - DNA, 25 bp, Artificial sequence
  F primer
  misc_feature (1)..(25): AB095645-3
taagctgctaggttgccccgccact

SEQ ID NO: 182 - DNA, 26 bp, Artificial sequence
  R primer
  misc_feature (1)..(26): AB095645-4
gcacggctacctctcgccggagtacg

SEQ ID NO: 183 - DNA, 25 bp, Artificial sequence
  Primer
  misc_feature (1)..(25): AB095645-5
aggaggcgggatcgggcgcgggaag

SEQ ID NO: 184 - DNA, 29 bp, Artificial sequence
  Primer
  misc_feature (1)..(29): AB956645-6
gaaacgtgggccatcgccattgagcgaaa

SEQ ID NO: 185 - DNA, 27 bp, Artificial sequence
  Primer
  misc_feature (1)..(27): AB095645-7
ttcctcttcctcccatcgcgaactcct

SEQ ID NO: 186 - DNA, 26 bp, Artificial sequence
  Primer
  misc_feature (1)..(26): AB0956645-8
tgccgtttctggagctgccctactga

SEQ ID NO: 187 - DNA, 29 bp, Artificial sequence
  Primer
  misc_feature (1)..(29): AB095645-9
gtaaaattgcagatcgatggatgtctcca

SEQ ID NO: 188 - DNA, 25 bp, Artificial sequence
  Primer
  misc_feature (1)..(25): AB095645-10
gaacctctccatgccgtgcaccccg

SEQ ID NO: 189 - DNA, 34 bp, Artificial sequence
  F primer
  misc_feature (1)..(34): AB095645-13
taataagagctcgctgctaggttgccccgccact

SEQ ID NO: 190 - DNA, 40 bp, Artificial sequence
  R primer
  misc_feature (1)..(40): AB095645-14
taataagcggccgcggtccgcacggctacctctcgccgga

SEQ ID NO: 191 - DNA, 46 bp, Artificial sequence
  F primer
  misc_feature (1)..(46): AB095645-11
gagagacctgcaggcggaccgctcgtcgccgtcgttggctcggcgt

SEQ ID NO: 192 - DNA, 37 bp, Artificial sequence
  R primer
  misc_feature (1)..(37): AB095645-12
atatatccatggtggttgatagccttatacatgtccc

SEQ ID NO: 193 - DNA, 28 bp, Artificial sequence
  F primer
  misc_feature (1)..(28): AF139664-1
tgcatccttacaaagagacagatagatc

SEQ ID NO: 194 - DNA, 29 bp, Artificial sequence
  R primer
  misc_feature (1)..(29): AF139664-2
caaggattttgtccatactgtgaaaaatg

SEQ ID NO: 195 - DNA, 25 bp, Artificial sequence
  F primer
  misc_feature (1)..(25): AF139664-3
taaggaggcttcagatccataccag

SEQ ID NO: 196 - DNA, 26 bp, Artificial sequence
  R primer
ggataaacattgtgaagcaacatttc

SEQ ID NO: 197 - DNA, 28 bp, Artificial sequence
  Primer
  misc_feature (1)..(28): AF139664-5
agaacaggaggaagaaggggcggggcaa

SEQ ID NO: 198 - DNA, 29 bp, Artificial sequence
  Primer
  misc_feature (1)..(29): AF139664-6
tacgccaccgactcaaggtacgtacgtac

SEQ ID NO: 199 - DNA, 28 bp, Artificial sequence
  Primer
  misc_feature (1)..(28): AF139664-7
tcatttttcacagtatcgacaaaatcct

SEQ ID NO: 200 - DNA, 29 bp, Artificial sequence
  Primer
  misc_feature (1)..(29): AF139664-8
tgggcaggaaaaggcatggcccaccccca

SEQ ID NO: 201 - DNA, 28 bp, Artificial sequence
  Primer
  misc_feature (1)..(28): AF139664-9
tgctttgattaatacagctcgcagcgac

SEQ ID NO: 202 - DNA, 28 bp, Artificial sequence
  Primer
  misc_feature (1)..(28): AF139664-10
acctgacccggtcccgtcgcctgctgct

SEQ ID NO: 203 - DNA, 33 bp, Artificial sequence
  Primer
  misc_feature (1)..(33): AF139664-11
taataagagctcggaggcttcagatccatacca

SEQ ID NO: 204 - DNA, 40 bp, Artificial sequence
  Primer
  misc_feature (1)..(40): AF139664-12
atatatgcggccgcggtccggataaacattgtgaagcaac

SEQ ID NO: 205 - DNA, 38 bp, Artificial sequence
  Primer
  misc_feature (1)..(38): AF139664-13
atatatggatccggaccgtgcatccttacaaagagaca

SEQ ID NO: 206 - DNA, 36 bp, Artificial sequence
  Primer
  misc_feature (1)..(36): AF139664-14
tatataccatggtggttgtccatactgtgaaaaatg

SEQ ID NO: 207 - DNA, 25 bp, Artificial sequence
  F primer
  misc_feature (1)..(25): AF139665-1
acctggggtttggaaatggggagcg

SEQ ID NO: 208 - DNA, 29 bp, Artificial sequence
  R primer
  misc_feature (1)..(29): AF139665-2
caaggatcccttccatactacagaagaag

SEQ ID NO: 209 - DNA, 27 bp, Artificial sequence
  F primer
  misc_feature (1)..(27): AF139665-3
tgaaggcatctgttgatctcaaacgtc

SEQ ID NO: 210 - DNA, 27 bp, Artificial sequence
  R primer
  misc_feature (1)..(27): AF139665-4
atgaactccacctcgggaactcagcct

SEQ ID NO: 211 - DNA, 29 bp, Artificial sequence
  Primer
  misc_feature (1)..(29): AF139665-5
ccgccgacgacgatcgggagagggccggt

SEQ ID NO: 212 - DNA, 27 bp, Artificial sequence
  Primer
  misc_feature (1)..(27): AF139665-6
tcttctgtagtatcgaagggatccttg

SEQ ID NO: 213 - DNA, 27 bp, Artificial sequence
  Primer
  misc_feature (1)..(27): AF139665-7
tcgccgcgcgcgcgcgatgggcgagct

SEQ ID NO: 214 - DNA, 32 bp, Artificial sequence
  Primer
  misc_feature (1)..(32): AF139665-8
tgatgagcggccgcaggcatctgttgatctca

SEQ ID NO: 215 - DNA, 40 bp, Artificial sequence
  Primer
  misc_feature (1)..(40): AF139665-9
tatataactagtgcggtccgatgaactccacctcgggaac

SEQ ID NO: 216 - DNA, 36 bp, Artificial sequence
  Primer
  misc_feature (1)..(36): AF139665-10
atatatgtcgacggaccgacctggggtttggaaatg

SEQ ID NO: 217 - DNA, 33 bp, Artificial sequence
  Primer
  misc_feature (1)..(33): AF139665-11
tatataccatggtggccttccatactacagaag

SEQ ID NO: 218 - DNA, 37 bp, Artificial sequence
  F primer
  misc_feature (1)..(37): AF141964-1
aaaacactgattaaagggttgttgaaaggaaaacacc

SEQ ID NO: 219 - DNA, 37 bp, Artificial sequence
  Primer
  misc_feature (1)..(29): AF141964-2
cataggtaccttcaatgctgaaaaagaaaacaaggca

SEQ ID NO: 220 - DNA, 25 bp, Artificial sequence
  F Primer
  misc_feature (1)..(25): AF141964-3
tgagcaggaagcacaggtgtcctgt

SEQ ID NO: 221 - DNA, 26 bp, Artificial sequence
  Primer
  misc_feature (1)..(26): AF141965-4
atgagatacaatctagtacaacgaat

SEQ ID NO: 222 - DNA, 34 bp, Artificial sequence
  Primer
  misc_feature (1)..(34): AF141964-5
gggtttttcggggcggggaaggcgcggaggggga

SEQ ID NO: 223 - DNA, 30 bp, Artificial sequence
  Primer
  misc_feature (1)..(30): AF141964-6
tgaagttgtccatgcttactaatactcaaa

SEQ ID NO: 224 - DNA, 31 bp, Artificial sequence
  Primer
  misc_feature (1)..(31): AF141964-7
attggttttcccatgcgtgtgatggatattc

SEQ ID NO: 225 - DNA, 40 bp, Artificial sequence
  Primer
  misc_feature (1)..(40): AF141964-8
gaccaaaaccagcccatgctgcatggtacactattaggct

SEQ ID NO: 226 - DNA, 33 bp, Artificial sequence
  Primer
  misc_feature (1)..(33): AF141964-9
cctaataagaaaccgatgggtataaaatggaga

SEQ ID NO: 227 - DNA, 33 bp, Artificial sequence
  Primer
  misc_feature (1)..(33): AF141964-10
agagaaaagagttgccttggcctctggctctgc

SEQ ID NO: 228 - DNA, 29 bp, Artificial sequence
  Primer
  misc_feature (1)..(29): AF141964-11
tgatgagcggccgcaggaagcacaggtgt

SEQ ID NO: 229 - DNA, 38 bp, Artificial sequence
  Primer
  misc_feature (1)..(38): AF141964-12
atatatcccgggcggtccgatgagatacaatctagtac

SEQ ID NO: 230 - DNA, 40 bp, Artificial sequence
  Primer
  misc_feature (1)..(40): AF141964-13
atatatcctgcaggcggaccgaaaacactgattaaagggt

SEQ ID NO: 231 - DNA, 38 bp, Artificial sequence
  Primer
  misc_feature (1)..(38): AF141964-14
atatatccatggtggccttcaatgctgaaaaagaaaac

SEQ ID NO: 232 - DNA, 27 bp, Artificial sequence
  Primer
  misc_feature (1)..(27): AF141965-1
tgtttctcgattaggctacaagttaac

SEQ ID NO: 233 - DNA, 27 bp, Artificial sequence
  R primer
  misc_feature (1)..(27): AF141965-2
gatggttttctgtaggctgcagaacag

SEQ ID NO: 234 - DNA, 28 bp, Artificial sequence
  F primer
  misc_feature (1)..(28): AF141965-3
tgaagaaggccagccacagcaacagctg

SEQ ID NO: 235 - DNA, 26 bp, Artificial sequence
  R primer
  misc_feature (1)..(26): AF141965-4
ccttatcgaatattcaaatctcgatg

SEQ ID NO: 236 - DNA, 28 bp, Artificial sequence
  Primer
  misc_feature (1)..(28): AF141965-5
gagagatcgggatcgatcgtgcggggga

SEQ ID NO: 237 - DNA, 29 bp, Artificial sequence
  Primer
  misc_feature (1)..(29): AF141965-6
tccaagcgccggaaaggcctcctcaagaa

SEQ ID NO: 238 - DNA, 29 bp, Artificial sequence
  Primer
  misc_feature (1)..(29): AF141965-7
gaaaatggaggatgcagaatatatatcct

SEQ ID NO: 239 - DNA, 27 bp, Artificial sequence
  Primer
  misc_feature (1)..(27): AF141965-8
aacaactgttccaaggagcatgtccac

SEQ ID NO: 240 - DNA, 26 bp, Artificial sequence
  misc_feature (1)..(26): AF141965-9
cttctcgcgcgcccgcgatttccgtt

SEQ ID NO: 241 - DNA, 25 bp, Artificial sequence
  Primer
  misc_feature (1)..(25): AF141965-10
tctccccccgcggcggcctctacga

SEQ ID NO: 242 - DNA, 29 bp, Artificial sequence
  Primer
  misc_feature (1)..(29): AF141965-11
tgatgagcggccgcagaaggccagccaca

SEQ ID NO: 243 - DNA, 35 bp, Artificial sequence
  Primer
  misc_feature (1)..(35): AF141965-12
tatatacccgggcggtccgccttatcgaatattca

SEQ ID NO: 244 - DNA, 37 bp, Artificial sequence
  Primer
  misc_feature (1)..(37): AF141965-13
atatatggatccggaccgtgtttctcgattaggctac

SEQ ID NO: 245 - DNA, 38 bp, Artificial sequence
  Primer
  misc_feature (1)..(38): AF141965-14
atatatccatggtggtctgtaggctgcagaacagacac

SEQ ID NO: 246 - DNA, 25 bp, Artificial sequence
  F primer
  misc_feature (1)..(25): AF174093-1
aaaattcacaagtataattcgtcac

SEQ ID NO: 247 - DNA, 25 bp, Artificial sequence
  Primer
  misc_feature (1)..(25): AF174093-2
cagctccatcaagcttaacaaagca

SEQ ID NO: 248 - DNA, 24 bp, Artificial sequence
  Primer
  misc_feature (1)..(24): AF174093-3
tgacttcctggaagcagtaggaac

SEQ ID NO: 249 - DNA, 25 bp, Artificial sequence
  R primer
  misc_feature (1)..(25): AF174093-4
ccccttctcctcctccgggaagaag

SEQ ID NO: 250 - DNA, 26 bp, Artificial sequence
  Primer
  misc_feature (1)..(26): AF174093-5
ggcgaggtcgcgttggggcaagggaa

SEQ ID NO: 251 - DNA, 28 bp, Artificial sequence
  Primer
  misc_feature (1)..(28): AF174093-6
gaagatcgagatcaagaggatcgaggac

SEQ ID NO: 252 - DNA, 25 bp, Artificial sequence
  Primer
  misc_feature (1)..(25): AF174093-7
cgtgctgtgcgaagcgcaggtcggc

SEQ ID NO: 253 - DNA, 25 bp, Artificial sequence
  Primer
  misc_feature (1)..(25): AF174093-8
aagaaggcgaaccagctcgccgtgc

SEQ ID NO: 254 - DNA, 29 bp, Artificial sequence
  F primer
  misc_feature (1)..(29): AF174093-10
tgatgagagctccttcctggaagcagtag

SEQ ID NO: 255 - DNA, 40 bp, Artificial sequence
  R primer
  misc_feature (1)..(40): AF174093-11
atatatgcggccgcggtccgccccttctcctcctccggga

SEQ ID NO: 256 - DNA, 40 bp, Artificial sequence
  misc_feature (1)..(40): AF174093-12
tatatcctgcaggcggaccgaaaattcacaagtataattc

SEQ ID NO: 257 - DNA, 33 bp, Artificial sequence
  R primer
  misc_feature (1)..(33): AF174093-13
tatataccatggtggtcaagcttaacaaagcat

SEQ ID NO: 258 - DNA, 30 bp, Artificial sequence
  Primer
  misc_feature (1)..(30): AF204063-1
acaaatttgttgtaccacctacctaggggt

SEQ ID NO: 259 - DNA, 27 bp, Artificial sequence
  R primer
  misc_feature (1)..(27): AF204063-2
caaggttttgtacatgctggaagtgaa

SEQ ID NO: 260 - DNA, 25 bp, Artificial sequence
  F primer
  misc_feature (1)..(25): AF204063-3
tgatgtgtgtgttcagttcaggctt

SEQ ID NO: 261 - DNA, 29 bp, Artificial sequence
  R primer
  misc_feature (1)..(29): AF204063-4
ctgcatatacttgcaacattgcaatttta

SEQ ID NO: 262 - DNA, 29 bp, Artificial sequence
  Primer
  misc_feature (1)..(29): AF204063-5
aggaggaggaagaagatcgggagggggaa

SEQ ID NO: 263 - DNA, 28 bp, Artificial sequence
  Primer
  misc_feature (1)..(28): AF204063-6
tctccagctcatcttggtacgtatagca

SEQ ID NO: 264 - DNA, 27 bp, Artificial sequence
  Primer
  misc_feature (1)..(27): AF204063-7
ttcacttccagcatctacaaaaccttg

SEQ ID NO: 265 - DNA, 26 bp, Artificial sequence
  Primer
  misc_feature (1)..(26): AF204063-8
atcttctccggccgccgccgcctctt

SEQ ID NO: 266 - DNA, 28 bp, Artificial sequence
  Primer
  misc_feature (1)..(28): AF204063-9
gtccagctagccaaggatggatatatta

SEQ ID NO: 267 - DNA, 37 bp, Artificial sequence
  F primer
  misc_feature (1)..(27): AF204063-10
tatatacccgggcggtccgctgcatatacttgcaaca

SEQ ID NO: 268 - DNA, 32 bp, Artificial sequence
  R primer
  misc_feature (1)..(32): AF204063-11
tgatgagcggccgctgtgtgtgttcagttcag

SEQ ID NO: 269 - DNA, 36 bp, Artificial sequence
  Primer
  misc_feature (1)..(36): AF204063-12
tatataggatccggaccgacaaatttgttgtaccac

SEQ ID NO: 270 - DNA, 33 bp, Artificial sequence
  R primer
  misc_feature (1)..(33): AF204063-13
atatatccatggtggtgtacatgctggaagtga

SEQ ID NO: 271 - DNA, 26 bp, Artificial sequence
  F primer
  misc_feature (1)..(26): AF345911-1
gaaaatctcaaggtttcgaaaacgac

SEQ ID NO: 272 - DNA, 30 bp, Artificial sequence
  R primer
  misc_feature (1)..(30): AF345911-2
caaggattttgtccatcctgcagggaaaac

SEQ ID NO: 273 - DNA, 26 bp, Artificial sequence
  F primer
  misc_feature: AF345911-3
taagatgatcatcgtcgtcgtcgtcg

SEQ ID NO: 274 - DNA, 32 bp, Artificial sequence
  R primer
  misc_feature (1)..(32): AF345911-4
ttgacttaaatggcaagataaattagatatag

SEQ ID NO: 275 - DNA, 27 bp, Artificial sequence
  Primer
  misc_feature (1)..(27): AF345911-5
agcggcgaggatcgggcgggggaaggt

SEQ ID NO: 276 - DNA, 28 bp, Artificial sequence
  Primer
  misc_feature (1)..(28): AF345911-6
gttttccctgcaggatcgacaaaatcct

SEQ ID NO: 277 - DNA, 27 bp, Artificial sequence
  Primer
  misc_feature (1)..(27): AF345911-7
cggccgcttccatcgatttcagctgct

SEQ ID NO: 278 - DNA, 28 bp, Artificial sequence
  Primer
  misc_feature (1)..(28): AF345911-8
agaactattccaaggtaattgtaccatc

SEQ ID NO: 279 - DNA, 32 bp, Artificial sequence
  Primer
  misc_feature (1)..(32): AF345911-9
taataagcggccgcgatgatcatcgtcgtcgt

SEQ ID NO: 280 - DNA, 36 bp, Artificial sequence
  Primer
  misc_feature (1)..(36): AF345911-10
tatatacccgggcggtccgttgacttaaatggcaag

SEQ ID NO: 281 - DNA, 34 bp, Artificial sequence
  Primer
  misc_feature (1)..(34): AF345911-11
tatatagtcgacggaccgaaaatctcaaggtttc

SEQ ID NO: 282 - DNA, 34 bp, Artificial sequence
  Primer
  misc_feature (1)..(34): AF345911-12
tatataccatggtggttgtcgatcctgcagggaa

SEQ ID NO: 283 - DNA, 27 bp, Artificial sequence
  F primer
  misc_feature (1)..(27): AF424549-1
tacaaagtgctggaagtgatagtatgt

SEQ ID NO: 284 - DNA, 28 bp, Artificial sequence
  R primer
  misc_feature (1)..(28): AF424549-2
gatccccttgatgctgcagcaggatgca

SEQ ID NO: 285 - DNA, 28 bp, Artificial sequence
  F primer
  misc_feature (1)..(28): AF424549-3
tgagatatcatcgccgccgccgccgccg

SEQ ID NO: 286 - DNA, 33 bp, Artificial sequence
  R primer
  misc_feature (1)..(33): AF424549-4
ttttattatcttggcgaggcccaagcacctttg

SEQ ID NO: 287 - DNA, 28 bp, Artificial sequence
  Primer
  misc_feature (1)..(28): AF424549-5
agggggcggcgatggggaggggcaagat

SEQ ID NO: 288 - DNA, 27 bp, Artificial sequence
  Primer
  misc_feature (1)..(27): AF424549-6
ccgcacggggatcatcaagaaggccag

SEQ ID NO: 289 - DNA, 27 bp, Artificial sequence
  Primer
  misc_feature (1)..(27): AF424549-7
aggtcgccatcatcaagttctcctcca

SEQ ID NO: 290 - DNA, 28 bp, Artificial sequence
  Primer
  misc_feature (1)..(28): AF424549-8
ttgcatctatccatcgttaaaacaagtc

SEQ ID NO: 291 - DNA, 30 bp, Artificial sequence
  Primer
  misc_feature (1)..(30): AF424549-9
tgatgagcggccgcgatatcatcgccgccg

SEQ ID NO: 292 - DNA, 36 bp, Artificial sequence
  Primer
  misc_feature (1)..(36): AF424549-10
tatatacccgggcggtccgttttattatcttggcga

SEQ ID NO: 293 - DNA, 35 bp, Artificial sequence
  Primer
  misc_feature (1)..(35): AF424549-11
tatatagtcgacggaccgtacaaagtgctggaagt

SEQ ID NO: 294 - DNA, 35 bp, Artificial sequence
  Primer
  misc_feature (1)..(35): AF424549-12
tatataccatggtggtgatgctgcagcaggatgca

SEQ ID NO: 295 - DNA, 29 bp, Artificial sequence
  F primer
  misc_feature (1)..(29): AJ293816-1
caaacattttaaactttaaccattaatag

SEQ ID NO: 296 - DNA, 28 bp, Artificial sequence
  R primer
  misc_feature (1)..(28): AJ293816-2
caataatctgttccatgcttcatcaatg

SEQ ID NO: 297 - DNA, 28 bp, Artificial sequence
  F primer
  misc_feature (1)..(28): AJ293816-3
tgatggctggaaactaaaactgagagga

SEQ ID NO: 298 - DNA, 28 bp, Artificial sequence
  R primer
  misc_feature (1)..(28): AJ293816-4
tttgaaacatttcggccctggctctcct

SEQ ID NO: 299 - DNA, 31 bp, Artificial sequence
  Primer
  misc_feature (1)..(31): AJ293816-5
tgtgtgatctgataaggctggcggcggcggt

SEQ ID NO: 300 - DNA, 30 bp, Artificial sequence
  Primer
  misc_feature (1)..(30): AJ293816-6
tacattgatgaagcatcgaacagattattg

SEQ ID NO: 301 - DNA, 32 bp, Artificial sequence
  Primer
  misc_feature (1)..(32): AJ293816-7
tgatgagcggccgctggctggaaactaaaact

SEQ ID NO: 302 - DNA, 38 bp, Artificial sequence
  Primer
  misc_feature (1)..(38): AJ293816-8
tatatacccgggcggtccgtttgaaacatttcggccct

SEQ ID NO: 303 - DNA, 38 bp, Artificial sequence
  Primer
  misc_feature (1)..(38): AJ293816-9
tatatagtcgacggaccgcaaacattttaaactttaac

SEQ ID NO: 304 - DNA, 36 bp, Artificial sequence
  Primer
  misc_feature (1)..(36): AJ293816-10
tatataccatggtggtgttcgatgcttcatcaatgt

SEQ ID NO: 305 - DNA, 27 bp, Artificial sequence
  F primer
  misc_feature (1)..(27): AY115556-1
gatataaaaacctactttatgttcatg

SEQ ID NO: 306 - DNA, 31 bp, Artificial sequence
  R primer
  misc_feature (1)..(31): AY115556-2
cagctcctccatggttctgttcaaagaaatc

SEQ ID NO: 307 - DNA, 27 bp, Artificial sequence
  F primer
  misc_feature (1)..(27): AY115556-3
taacactaataatggcctgggggatac

SEQ ID NO: 308 - DNA, 27 bp, Artificial sequence
  R primer
  misc_feature (1)..(27): AY115556-4
aactttgcacgaatgattaaattgcat

SEQ ID NO: 309 - DNA, 28 bp, Artificial sequence
  Primer
  misc_feature (1)..(28): AY115556-5
cttatcttgatcgatcgcgcgaggcaag

SEQ ID NO: 310 - DNA, 23 bp, Artificial sequence
  Primer
  misc_feature (1)..(23): AY115556-6
tgaacagaaccatcgaggagctg

SEQ ID NO: 311 - DNA, 28 bp, Artificial sequence
  misc_feature (1)..(28): AY115556-7
agctctgatatagcatggaggttaattg

SEQ ID NO: 312 - DNA, 30 bp, Artificial sequence
  Primer
  misc_feature (1)..(30): AY115556-8
taataagcggccgcactaataatggcctgg

SEQ ID NO: 313 - DNA, 34 bp, Artificial sequence
  Primer
  misc_feature (1)..(34): AY115556-9
tatatacccgggcggtccgaactttgcacgaatg

SEQ ID NO: 314 - DNA, 41 bp, Artificial sequence
  Primer
  misc_feature (1)..(41): AY115556-10
tatatacctgcaggcggaccgatataaaaacctactttatg

SEQ ID NO: 315 - DNA, 38 bp, Artificial sequence
  Primer
  misc_feature (1)..(38): AY115556-11
atatatccatggtggcgatggttctgttcaaagaaatc

SEQ ID NO: 316 - DNA, 27 bp, Artificial sequence
  F primer
  misc_feature (1)..(27): AY177695-1
tcagtccatcatttcgtctacaactaa

SEQ ID NO: 317 - DNA, 27 bp, Artificial sequence
  R primer
  misc_feature (1)..(27): AY177695-2
tattattgatttcatgctaacaaaaag

SEQ ID NO: 318 - DNA, 27 bp, Artificial sequence
  F primer
  misc_feature (1)..(27): AY177695-3
taacacatgatcaagtgttaaaaacag

SEQ ID NO: 319 - DNA, 27 bp, Artificial sequence
  R primer
  misc_feature (1)..(27): AY177695-4
ggctcggtcaaaccagcgtggtgagct

SEQ ID NO: 320 - DNA, 27 bp, Artificial sequence
  Primer
  misc_feature (1)..(27): AY177695-5
tcgatcgattgaagaaggggagaggga

SEQ ID NO: 321 - DNA, 26 bp, Artificial sequence
  Primer
  misc_feature (1)..(26): AY177695-6
gacaacacgaagaaccggcaggtgac

SEQ ID NO: 322 - DNA, 30 bp, Artificial sequence
  Primer
  misc_feature (1)..(30): AY177695-7
cgcggcgggctgatcaagaaggcccgggag

SEQ ID NO: 323 - DNA, 27 bp, Artificial sequence
  Primer
  misc_feature (1)..(27): AY177695-8
ctttttgttagcatcaaatcaataata

SEQ ID NO: 324 - DNA, 31 bp, Artificial sequence
  Primer
  misc_feature (1)..(31): AY177695-9
tgaagagcaaaccatcgagctaacaaacaca

SEQ ID NO: 325 - DNA, 34 bp, Artificial sequence
  Primer
  misc_feature (1)..(34): AY177695-10
tcagggatgacaacacgatggcaccatcagtcat

SEQ ID NO: 326 - DNA, 34 bp, Artificial sequence
  Primer
  misc_feature (1)..(11): AY177695-11
taataagagctccacatgatcaagtgttaaaaac

SEQ ID NO: 327 - DNA, 38 bp, Artificial sequence
  Primer
  misc_feature (1)..(38): AY177695-12
tatatagcggccgcggtccggctcggtcaaaccagcgt

SEQ ID NO: 328 - DNA, 36 bp, Artificial sequence
  Primer
  misc_feature (1)..(36): AY177695-13
tatataggatccggaccgtcagtccatcatttcgtc

SEQ ID NO: 329 - DNA, 35 bp, Artificial sequence
  Primer
  misc_feature (1)..(35): AY177695-14
tatataccatggtggatttgatgctaacaaaaagg

SEQ ID NO: 330 - DNA, 28 bp, Artificial sequence
  F primer
  misc_feature (1)..(28): AY177696-1
caagcaaagaaacaaatttcgcaattag

SEQ ID NO: 331 - DNA, 28 bp, Artificial sequence
  R primer
  misc_feature (1)..(28): AY177696-2
ataactgacttcatgctgcatatttgca

SEQ ID NO: 332 - DNA, 26 bp, Artificial sequence
  F primer
  misc_feature (1)..(26): AY177696-3
tgaccagaaaaacattgttttgctac

SEQ ID NO: 333 - DNA, 26 bp, Artificial sequence
  R primer
  misc_feature (1)..(26): AY177696-4
tttgggattggactgcatcccaggaa

SEQ ID NO: 334 - DNA, 30 bp, Artificial sequence
  Primer
  misc_feature (1)..(30): AY177696-5
tagcggcgaagaagatcgggagggggaaga

SEQ ID NO: 335 - DNA, 26 bp, Artificial sequence
  Primer
  misc_feature (1)..(26): AY177696-6
gaggtcggcctcaagatcttctccag

SEQ ID NO: 336 - DNA, 26 bp, Artificial sequence
  Primer
  misc_feature (1)..(26): AY177696-7
caaatatgcagcatcaagtcagttat

SEQ ID NO: 337 - DNA, 28 bp, Artificial sequence
  Primer
  misc_feature (1)..(28): AY177696-8
cagcatgggccatcgccagctcttctct

SEQ ID NO: 338 - DNA, 31 bp, Artificial sequence
  Primer
  misc_feature (1)..(31): AY177696-9
tgatgagagctcccagaaaaacattgttttg

SEQ ID NO: 339 - DNA, 33 bp, Artificial sequence
  Primer
  misc_feature (1)..(33): AY177696-10
tatatagcggccgcggtccgtttgggattggac

SEQ ID NO: 340 - DNA, 39 bp, Artificial sequence
  Primer
  misc_feature (1)..(39): AY177696-11
tatataggatccggaccgcaagcaaagaaacaaatttcg

SEQ ID NO: 341 - DNA, 32 bp, Artificial sequence
  Primer
  misc_feature (1)..(32): AY177696-12
atataccatggtggcttgatgctgcatatttg

SEQ ID NO: 342 - DNA, 26 bp, Artificial sequence
  F primer
  misc_feature (1)..(26): AY177698-1
aagatttgaactactgccttgtcttc

SEQ ID NO: 343 - DNA, 27 bp, Artificial sequence
  R primer
  misc_feature (1)..(27): AY177698-2
caaagatatttgcaatcctgccaaaag

SEQ ID NO: 344 - DNA, 27 bp, Artificial sequence
  F primer
  misc_feature (1)..(27): AY177698-3
tgattgccctctttccatcccaatagg

SEQ ID NO: 345 - DNA, 26 bp, Artificial sequence
  R primer
  misc_feature (1)..(26): AY177698-4
gttaacctaaaagaaatattgttcag

SEQ ID NO: 346 - DNA, 26 bp, Artificial sequence
  Primer
  misc_feature (1)..(26): AY177698-5
accaacctgatcaaaggggcgtggga

SEQ ID NO: 347 - DNA, 30 bp, Artificial sequence
  Primer
  misc_feature (1)..(30): AY177698-6
tccaagaggaggatcgggctgctcaagaaa

SEQ ID NO: 348 - DNA, 26 bp, Artificial sequence
  Primer
  misc_feature (1)..(26): AY177698-7
aggcactggcaagaagtacgagtact

SEQ ID NO: 349 - DNA, 29 bp, Artificial sequence
  Primer
  misc_feature (1)..(29): AY177698-8
aggaggccaacctgcatggctacgttctt

SEQ ID NO: 350 - DNA, 26 bp, Artificial sequence
  Primer
  misc_feature (1)..(26): AY177698-9
gctcgtttgatccaaggacaagatca

SEQ ID NO: 351 - DNA, 26 bp, Artificial sequence
  Primer
  misc_feature (1)..(26): AY177698-10
ttcctaaggacacgatggagtctgga

SEQ ID NO: 352 - DNA, 30 bp, Artificial sequence
  Primer
  misc_feature (1)..(30): AY177698-11
tgatgagcggccgcttgccctctttccatc

SEQ ID NO: 353 - DNA, 35 bp, Artificial sequence
  Primer
  misc_feature (1)..(35): AY177698-12
tatatacccgggcggtccgttaacctaaaagaaat

SEQ ID NO: 354 - DNA, 37 bp, Artificial sequence
  Primer
  misc_feature (1)..(13): AY177698-13
tatataggatccggaccgaagatttgaactactgcct

SEQ ID NO: 355 - DNA, 30 bp, Artificial sequence
  Primer
  misc_feature (1)..(30): AY177698-14
tatataccatggtggtttgcaatcctgcca

SEQ ID NO: 356 - DNA, 25 bp, Artificial sequence
  F primer
  misc_feature (1)..(25): AY177699-1
tccggtcggccctcgtcctccccgt

SEQ ID NO: 357 - DNA, 28 bp, Artificial sequence
  R primer
  misc_feature (1)..(28): AY177699-2
caaactccctcacgctgcgccaagaaag

SEQ ID NO: 358 - DNA, 27 bp, Artificial sequence
  F primer
  misc_feature (1)..(27): AY177699-3
tagaaacagatggacgcttgacgttca

SEQ ID NO: 359 - DNA, 28 bp, Artificial sequence
  R primer
  misc_feature (1)..(28): AY177699-4
aggcttggtgcaaggatacgaaatcttg

SEQ ID NO: 360 - DNA, 26 bp, Artificial sequence
  Primer
  misc_feature (1)..(26): AY177699-5
atcggccagaatcgggagggggcgca

SEQ ID NO: 361 - DNA, 28 bp, Artificial sequence
  Primer
  misc_feature (1)..(28): AY177699-6
agtcgcccccggccttttaagagccgca

SEQ ID NO: 362 - DNA, 32 bp, Artificial sequence
  Primer
  misc_feature (1)..(32): AY177699-7
tagtaggcggccgcaaacagatggacgcttga

SEQ ID NO: 363 - DNA, 33 bp, Artificial sequence
  Primer
  misc_feature (1)..(33): AY177699-8
tatatacccgggcggtccgaggcttggtgcaag

SEQ ID NO: 364 - DNA, 37 bp, Artificial sequence
  Primer
  misc_feature (1)..(37): AY177699-9
tatataggatccggaccgtccggtcggccctcgtcct

SEQ ID NO: 365 - DNA, 29 bp, Artificial sequence
  Primer
  misc_feature (1)..(29): AY177699-10
tatataccatggtggctcacgctgcgcca

SEQ ID NO: 366 - DNA, 27 bp, Artificial sequence
  F primer
  misc_feature (1)..(27): AY177700-1
ataagtatttcagaaagctgaagttga

SEQ ID NO: 367 - DNA, 27 bp, Artificial sequence
  R primer
  misc_feature (1)..(27): AY177700-2
caagttatgcatatttcttgcattttg

SEQ ID NO: 368 - DNA, 27 bp, Artificial sequence
  F primer
  misc_feature (1)..(27): AY177700-3
tagccgtcaaaggaccttggtcaattc

SEQ ID NO: 369 - DNA, 27 bp, Artificial sequence
  R primer
  misc_feature (1)..(27): AY177700-4
taattttactagtacttttactttgac

SEQ ID NO: 370 - DNA, 26 bp, Artificial sequence
  Primer
  misc_feature (1)..(26): AY177700-5
aagagtgaaacaacaaggtcagagga

SEQ ID NO: 371 - DNA, 26 bp, Artificial sequence
  Primer
  misc_feature (1)..(26): AY177700-6
gaaaggtgcaaatccgacgaatagag

SEQ ID NO: 372 - DNA, 26 bp, Artificial sequence
  Primer
  misc_feature (1)..(26): AY177700-7
attagctactaaagggtgtgtttcca

SEQ ID NO: 373 - DNA, 26 bp, Artificial sequence
  Primer
  misc_feature (1)..(26): AY177700-8
aaaatgcaagaaatttgcataacttg

SEQ ID NO: 374 - DNA, 26 bp, Artificial sequence
  Primer
  misc_feature (1)..(26): AY177700-9
taggattcataacgatggacatgttc

SEQ ID NO: 375 - DNA, 26 bp, Artificial sequence
  Primer
  misc_feature (1)..(26): AY177700-10
tagtaggcggccgcgtcaaaggacct

SEQ ID NO: 376 - DNA, 35 bp, Artificial sequence
  Primer
  misc_feature (1)..(35): AY177700-11
tatatacccgggcggtccgtaattttactagtact

SEQ ID NO: 377 - DNA, 35 bp, Artificial sequence
  Primer
  misc_feature (1)..(35): AY177700-12
tatataggatccggaccgataagtatttcagaaag

SEQ ID NO: 378 - DNA, 34 bp, Artificial sequence
  primer
  misc_feature (1)..(34): AY177700-13
tatataccatggtgggcaaatttcttgcattttg

SEQ ID NO: 379 - DNA, 25 bp, Artificial sequence
  F primer
  misc_feature (1)..(25): AY177702-1
tcttttcgcaaactaaacaaggcct

SEQ ID NO: 380 - DNA, 30 bp, Artificial sequence
  R primer
  misc_feature (1)..(30): AY177702-2
cacagttttcatgctagcatgcaagtaaag

SEQ ID NO: 381 - DNA, 27 bp, Artificial sequence
  F primer
  misc_feature (1)..(27): AY177702-3
taagactatgccgtacaagctggacga

SEQ ID NO: 382 - DNA, 30 bp, Artificial sequence
  R primer
  misc_feature (1)..(30): AY177702-4
ccgtggttgtcacagaagaccaatctatac

SEQ ID NO: 383 - DNA, 28 bp, Artificial sequence
  Primer
  misc_feature (1)..(28): AY177702-5
gagagcgaggagatcgggagggggaaga

SEQ ID NO: 384 - DNA, 27 bp, Artificial sequence
  Primer
  misc_feature (1)..(27): AY177702-6
ttacttgcatgctagcttgaaaactgt

SEQ ID NO: 385 - DNA, 28 bp, Artificial sequence
  Primer
  misc_feature (1)..(28): AY177702-7
atcctaaattttcatcgatggcatctag

SEQ ID NO: 386 - DNA, 29 bp, Artificial sequence
  Primer
  misc_feature (1)..(29): AY177702-8
gatcaggaccatgccagtctgatggccaa

SEQ ID NO: 387 - DNA, 26 bp, Artificial sequence
  Primer
  misc_feature (1)..(26): AY177702-9
gcacaaggaaagccttggaacatctt

SEQ ID NO: 388 - DNA, 29 bp, Artificial sequence
  Primer
  misc_feature (1)..(29): AY177702-10
taataagagctcgactatgccgtacaagc

SEQ ID NO: 389 - DNA, 32 bp, Artificial sequence
  Primer
  misc_feature (1)..(32): AY177702-11
atatatgcggccgcggtccgtggttgtcacag

SEQ ID NO: 390 - DNA, 36 bp, Artificial sequence
  Primer
  misc_feature (1)..(36): AY177702-12
tatatagtcgacggaccgtcttttcgcaaactaaac

SEQ ID NO: 391 - DNA, 32 bp, Artificial sequence
  Priemr
  misc_feature (1)..(32): AY177702-13
tatataccatggtggtcaagctagcatgcaag

SEQ ID NO: 392 - DNA, 30 bp, Artificial sequence
  F primer
  misc_feature (1)..(30): AY224482-1
tcttttcgcaaactaaacaaggccttaaca

SEQ ID NO: 393 - DNA, 29 bp, Artificial sequence
  R primer
  misc_feature (1)..(29): AY224482-2
tatcacagttttcatgctagcatgcaagt

SEQ ID NO: 394 - DNA, 27 bp, Artificial sequence
  F primer
  misc_feature (1)..(27): AY224482-3
taagactatgccgtacaagctggacga

SEQ ID NO: 395 - DNA, 30 bp, Artificial sequence; identical to SEQ ID NO: 382
  R primer
  misc_feature (1)..(30): AY224482-4

SEQ ID NO: 396 - DNA, 28 bp, Artificial sequence
  Primer
  misc_feature (1)..(28): AY224482-5
gagagcgaggagatcgggagggggaaga

SEQ ID NO: 397 - DNA, 26 bp, Artificial sequence
  Primer
  misc_feature (1)..(26): AY224482-6
cttgcatgctagcttgaaaactgtga

SEQ ID NO: 398 - DNA, 25 bp, Artificial sequence
  Primer
  misc_feature (1)..(25): AY224482-7
ctaaattttcatgcatggcatctag

SEQ ID NO: 399 - DNA, 26 bp, Artificial sequence
  Priemr
  misc_feature (1)..(26): AY224482-8
tgatcaggaccatcgcagtctgatgg

SEQ ID NO: 400 - DNA, 26 bp, Artificial sequence
  Primer
  misc_feature (1)..(26): AY224482-9
caaggaaagccaaggaacatctttac

SEQ ID NO: 401 - DNA, 29 bp, Artificial sequence
  Primer
  misc_feature (1)..(29): AY224482-10
taataagagctcgactatgccgtacaagc

SEQ ID NO: 402 - DNA, 33 bp, Artificial sequence
  Primer
  misc_feature (1)..(33): AY224482-11
tatatagcggccgcggtccgtggttgtcacaga

SEQ ID NO: 403 - DNA, 40 bp, Artificial sequence
  Primer
  misc_feature (1)..(40): AY224482-12
tatatagtcgacggaccgtcttttcgcaaactaaacaagg

SEQ ID NO: 404 - DNA, 28 bp, Artificial sequence
  Primer
  misc_feature (1)..(28): AY224482-13
tatataccatggtggttttcaagctagc

SEQ ID NO: 405 - DNA, 30 bp, Artificial sequence
  F Primer
  misc_feature (1)..(30): AY250075-1
gaaatggtttcattttgggacaagttattg

SEQ ID NO: 406 - DNA, 33 bp, Artificial sequence
  R primer
  misc_feature (1)..(33): AY250075-2
caaggattcgctccatactatcaataaaatatg

SEQ ID NO: 407 - DNA, 28 bp, Artificial sequence
  F primer
  misc_feature (1)..(28): AY250075-3
tagaagatgttcagatgaaatggtccct

SEQ ID NO: 408 - DNA, 31 bp, Artificial sequence
  R primer
  misc_feature (1)..(31): AY250075-4
aaaaaaatcaccggcgtcaaatatttaggga

SEQ ID NO: 409 - DNA, 27 bp, Artificial sequence
  Primer
  misc_feature (1)..(27): AY250075-5
agagagagagatgaaggggagggggaa

SEQ ID NO: 410 - DNA, 26 bp, Artificial sequence
  Primer
  misc_feature (1)..(26): AY250075-6
tattgatagtatcgagcgaatccttg

SEQ ID NO: 411 - DNA, 27 bp, Artificial sequence
  primer
  misc_feature (1)..(27): AY250075-7
cagttggttgccaaggcgcgttgccga

SEQ ID NO: 412 - DNA, 28 bp, Artificial sequence
  Primer
  misc_feature (1)..(28): AY250075-8
gagcctcggccatgcccagctccttcct

SEQ ID NO: 413 - DNA, 31 bp, Artificial sequence
  Primer
  misc_feature (1)..(31): AY250075-9
ctattattttaagaaagcatggattatatag

SEQ ID NO: 414 - DNA, 26 bp, Artificial sequence
  Primer
  misc_feature (1)..(26): AY250075-10
tgagacagacccatgcctgggcctac

SEQ ID NO: 415 - DNA, 30 bp, Artificial sequence
  Primer
  misc_feature (1)..(30): AY250075-11
tagtagagctcaagatgttcagatgaaatg

SEQ ID NO: 416 - DNA, 37 bp, Artificial sequence
  Primer
  misc_feature (1)..(37): AY250075-12
tatatagcggccgcggtccgaaaaaaatcaccggcgt

SEQ ID NO: 417 - DNA, 38 bp, Artificial sequence
  Primer
  misc_feature (1)..(38): AY250075-13
tatatacctgcaggcggaccgaaatggtttcattttgg

SEQ ID NO: 418 - DNA, 30 bp, Artificial sequence
  Primer
  misc_feature (1)..(30): AY250075-14
tatataccatggtggcgctcgatactatca

SEQ ID NO: 419 - DNA, 30 bp, Artificial sequence; identical to SEQ ID NO: 405
  misc_feature (1)..(30): L37527-1

SEQ ID NO: 420 - DNA, 26 bp, Artificial sequence
  R primer
  misc_feature (1)..(26): L37527-2
cagctcagatcggtctggacacaaac

SEQ ID NO: 421 - DNA, 25 bp, Artificial sequence
  F Primer
  misc_feature (1)..(25): L37527-3
taggctgctgagcactgccaatttg

SEQ ID NO: 422 - DNA, 26 bp, Artificial sequence
  Primer
  misc_feature (1)..(26): L37527-4
tgctggtgctcgaggtgctgagcgcg

SEQ ID NO: 423 - DNA, 29 bp, Artificial sequence
  Primer
  misc_feature (1)..(29): L37527-5
gaggagttggatatcgggcgcggcaagat

SEQ ID NO: 424 - DNA, 25 bp, Artificial sequence
  Primer
  misc_feature (1)..(25): L37527-6
acctccattccttgcatggcggcct

SEQ ID NO: 425 - DNA, 27 bp, Artificial sequence
  Primer
  misc_feature (1)..(27): L37527-7
tactccactccaacgatggcgtccagt

SEQ ID NO: 426 - DNA, 30 bp, Artificial sequence
  Primer
  misc_feature (1)..(30): L37527-8
acggcagcggcccgtccggcagctccggga

SEQ ID NO: 427 - DNA, 30 bp, Artificial sequence
  Primer
  misc_feature (1)..(30): L37527-9
gaacctctccatcgcgccgccccgggggct

SEQ ID NO: 428 - DNA, 28 bp, Artificial sequence
  Primer
  misc_feature (1)..(28): L37527-10
tagtagagctcgctgctgagcactgcca

SEQ ID NO: 429 - DNA, 36 bp, Artificial sequence
  misc_feature (1)..(36): L37527-11
tatatagcggccgcggtccgtgctggtgctcgaggt

SEQ ID NO: 430 - DNA, 36 bp, Artificial sequence
  Primer
  misc_feature (1)..(36): L37527-12
tatatacctgcaggcggaccgccaagagagccccct

SEQ ID NO: 431 - DNA, 31 bp, Artificial sequence
  Primer
  misc_feature (1)..(13): L37527-13
tatataccatggtggttgacagcctaaaacg

SEQ ID NO: 432 - DNA, 27 bp, Artificial sequence
  F primer
  misc_feature (1)..(27): L37528-1
accacctcaatctccactgtttgattg

SEQ ID NO: 433 - DNA, 26 bp, Artificial sequence
  F primer
  misc_feature (1)..(26): L37528-2
cagctcagatcggtctggacacaaac

SEQ ID NO: 434 - DNA, 27 bp, Artificial sequence
  F primer
  misc_feature (1)..(27): L37528-3
tagttttggtgtagacaccgtacgtac

SEQ ID NO: 435 - DNA, 28 bp, Artificial sequence
  R primer
  misc_feature (1)..(28): L37528-4
tgaaagctacattttagccttgtatttg

SEQ ID NO: 436 - DNA, 30 bp, Artificial sequence
  Primer
  misc_feature (1)..(30): L37528-5
agcatacccatccatcttgaacatgatggt

SEQ ID NO: 437 - DNA, 33 bp, Artificial sequence
  Primer
  misc_feature (1)..(33): L37528-6
catccatcttgaacatcttggtaaattctggct

SEQ ID NO: 438 - DNA, 27 bp, Artificial sequence
  Primer
  misc_feature (1)..(27): L37528-7
atgtgaggaccatcgattgatgcattg

SEQ ID NO: 439 - DNA, 27 bp, Artificial sequence
  Primer
  misc_feature (1)..(27): L37528-8
tagtagagctcttttggtgtagacacc

SEQ ID NO: 440 - DNA, 37 bp, Artificial sequence
  Primer
  misc_feature (1)..(37): L37528-9
atatagcggccgcggtccgtgaaagctacattttagc

SEQ ID NO: 441 - DNA, 36 bp, Artificial sequence
  Primer
  misc_feature (1)..(36): L37528-10
tatataggatccggaccgaccacctcaatctccact

SEQ ID NO: 442 - DNA, 28 bp, Artificial sequence
  Primer
  misc_feature (1)..(28): L37528-11
tatataccatggtggatcggtctggaca

SEQ ID NO: 443 - DNA, 32 bp, Artificial sequence
  F primer
  misc_feature (1)..(32): U78891-1
tcttcttcttgccttcatttgagttaattaca

SEQ ID NO: 444 - DNA, 28 bp, Artificial sequence
  R primer
  misc_feature (1)..(28): U78891-2
caagcgttttagtcatgctacaaagttc

SEQ ID NO: 445 - DNA, 29 bp, Artificial sequence
  F primer
  misc_feature (1)..(29): U78891-3
tgaacagtgcgtgcatgaacacctacatg

SEQ ID NO: 446 - DNA, 31 bp, Artificial sequence
  R primer
  misc_feature (1)..(31): U78891-4
gatgtttttttttgtcttttgatgcaaggcc

SEQ ID NO: 447 - DNA, 29 bp, Artificial sequence
  Primer
  misc_feature (1)..(29): U78891-5
agatcgatcgggatcgggaggggtcgggt

SEQ ID NO: 448 - DNA, 26 bp, Artificial sequence
  Primer
  misc_feature (1)..(26): U78891-6
gaactttgtagcatcactaaaacgct

SEQ ID NO: 449 - DNA, 28 bp, Artificial sequence
  misc_feature (1)..(28): U78891-7
gtccatgaaacaaaccgatggtaattgc

SEQ ID NO: 450 - DNA, 28 bp, Artificial sequence
  Primer
  misc_feature (1)..(28): U78891-8
acctacatgcccgcatggctaccatgat

SEQ ID NO: 451 - DNA, 26 bp, Artificial sequence
  Primer
  misc_feature (1)..(26): U78891-9
tcgtcgttttctcgatggccttgcat

SEQ ID NO: 452 - DNA, 28 bp, Artificial sequence
  Primer
  misc_feature (1)..(28): U78891-10
tgatgagctcacagtgcgtgcatgaaca

SEQ ID NO: 453 - DNA, 44 bp, Artificial sequence
  Primer
  misc_feature (1)..(44): U78891-11
tatatagcggccgcggtccgatgtttttttttgtcttttgatgc

SEQ ID NO: 454 - DNA, 39 bp, Artificial sequence
  Primer
  misc_feature (1)..(39): U78891-12
tatataggatccggaccgtcttcttcttgccttcatttg

SEQ ID NO: 455 - DNA, 35 bp, Artificial sequence
  Primer
  misc_feature (1)..(35): U78891-13
tatataccatggtggttagtgatgctacaaagttc

SEQ ID NO: 456 - DNA, 31 bp, Artificial sequence
  PL-5
  misc_feature (1)..(31): PL-F
ccgcgggcggccgcactagtcccgggcccat

SEQ ID NO: 457 - DNA, 37 bp, Artificial sequence
  PL-R
  misc_feature (1)..(37): PL-R
cgatgggcccgggactagtgcggccgcccgcggagct

SEQ ID NO: 458 - DNA, 25 bp, Artificial sequence
  PL-1
  misc_feature (1)..(25): PL1
gtaccggaccgcgatcgcttaatta

SEQ ID NO: 459 - DNA, 25 bp, Artificial sequence
  PL-2
  misc_feature (1)..(25): PL-2
agcttaattaagcgatcgcggtccg

SEQ ID NO: 460 - DNA, 29 bp, Artificial sequence
  OsMADS5-P3
  misc_feature (1)..(29): OsMADS5-P3
tgagcaggtagccggcgaccaatcgcgag

SEQ ID NO: 461 - DNA, 34 bp, Artificial sequence
  OsMADS5-P3
  misc_feature (1)..(34): OsMADS5-P2
catactgttacaaaaaagaaaatcagtggaccac

SEQ ID NO: 462 - DNA, 29 bp, Artificial sequence
  Primer
  misc_feature (1)..(29): OsMADS5-T1
atgaattgcttatcacattaatggacatc

SEQ ID NO: 463 - DNA, 32 bp, Artificial sequence
  Primer
  misc_feature (1)..(32): OsMADS5-T2
caaaactacatcaagagccttggaattggtcc

SEQ ID NO: 464 - DNA, 30 bp, Artificial sequence
  Primer
  misc_feature (1)..(30): OsMADS5-C3
cagtgtcgacggggcgagggaaagtagagc

SEQ ID NO: 465 - DNA, 40 bp, Artificial sequence
  Primer
  misc_feature (1)..(40): OsMADS5-C3
cgatccatggtggatactgttacaaaaaagaaaatcagtg

SEQ ID NO: 466 - DNA, 37 bp, Artificial sequence
  Primer
  misc_feature (1)..(37): OsMADS5-C1
gactctcgaggcgcgcctgagcaggtagccggcgacc

SEQ ID NO: 467 - DNA, 33 bp, Artificial sequence
  Primer
  misc_feature (1)..(33): OsMADS5-C2b
gtgtgtctcgagctctctctagctctctctcgg

SEQ ID NO: 468 - DNA, 46 bp, Artificial sequence
  Primer
  misc_feature (1)..(46): OsMADS5T-F
cccgggccatggggggtctagaatgaattgcttatcacattaatgg

SEQ ID NO: 469 - DNA, 32 bp, Artificial sequence
  Primer
  misc_feature (1)..(32): OsMADS5T-R
cccgggcgcgccggatgagaacagctacatcc

SEQ ID NO: 470 - DNA, 29 bp, Artificial sequence
  misc_feature (1)..(29): OsMADS6-P1
ctaggacgatggtgtgatgtgggaacacg

SEQ ID NO: 471 - DNA, 31 bp, Artificial sequence
  Primer
  misc_feature (1)..(31): OsMADS6-P2
gtacctttctaaagtctttgttatgctgcac

SEQ ID NO: 472 - DNA, 27 bp, Artificial sequence
  Primer
  misc_feature (1)..(27): OsMADS6-T1
gctaagcagccatcgatcagctgtcag

SEQ ID NO: 473 - DNA, 30 bp, Artificial sequence
  Primer
  misc_feature (1)..(30): OsMADS6-T2
gatgccattgtgtaatgaatggaggagagc

SEQ ID NO: 474 - DNA, 30 bp, Artificial sequence
  Primer\
  misc_feature (1)..(30): OsMADS6-P3b
cgagtcgacgaggggaagagttgagctgag

SEQ ID NO: 475 - DNA, 31 bp, Artificial sequence
  Primer
  misc_feature (1)..(31): OsMADS6-P4c
gactccatggtggttatgctgcacaaaaatg

SEQ ID NO: 476 - DNA, 37 bp, Artificial sequence
  Primer
  misc_feature (1)..(37): OsMADS6-C1b
cagtgcatgcggaccgctaggacgatggtgtgatgtg

SEQ ID NO: 477 - DNA, 29 bp, Artificial sequence
  Primer
  misc_feature (1)..(29): OsMADS6-Paa
cctcgtcgactcgcccgatcgatcgaacg

SEQ ID NO: 478 - DNA, 30 bp, Artificial sequence
  Primer
  misc_feature (1)..(30): OsMADS6-C4b
acgtgagctcgctaagcagccatcgatcag

SEQ ID NO: 479 - DNA, 32 bp, Artificial sequence
  Primer
  misc_feature (1)..(32): OsMADS6-C2
actgcggaccgatgccattgtgtaatgaatgg

SEQ ID NO: 480 - DNA, 35 bp, Artificial sequence
  Primer
  misc_feature (1)..(35): OsMADS8-T1
acgtgagctcactcctgaaggccgatgcgacaacc

SEQ ID NO: 481 - DNA, 39 bp, Artificial sequence
  misc_feature (1)..(39): OsMADS8-T2
agtcatcgatcatgacaaaatatcatgtttatttcgagg

SEQ ID NO: 482 - DNA, 37 bp, Artificial sequence
  Primer
  misc_feature (1)..(37): OsMADS8-Pcc
atcgccatggtggtcaagctgcaagtttcaaaaacac

SEQ ID NO: 483 - DNA, 25 bp, Artificial sequence
  Primer
  misc_feature (1)..(25): OsMADS8-C3
acgtgtcgacgagagggagggtgga

SEQ ID NO: 484 - DNA, 27 bp, Artificial sequence
  Primer
  misc_feature (1)..(27): OsMADS8-C5b
tcctcctcctcctcctccacctcacct

SEQ ID NO: 485 - DNA, 41 bp, Artificial sequence
  Primer
  misc_feature (1)..(41): OsMADS8-C1b
aactaaatcgcctgcaggcggaccgttttttgcgaaatgcc

SEQ ID NO: 486 - DNA, 10 bp, Artificial sequence
  Oligo
  misc_feature (1)..(10): 8PA-1
ggagatcggg

SEQ ID NO: 487 - DNA, 14 bp, Artificial sequence
  Oligo
  misc_feature (1)..(14): 8PA-2
tcgacccgatcacc

SEQ ID NO: 488 - DNA, 33 bp, Artificial sequence
  Primer
  misc_feature (1)..(33): OsMADS8-C2
acgtcccgggcggaccgagtcatcgatcatgac

SEQ ID NO: 489 - DNA, 38 bp, Artificial sequence
  Primer
  misc_feature (1)..(38): OsMADS8-C4
tcgagcggccgcaggccgatgcgacaaccaataaaaac

SEQ ID NO: 490 - DNA, 41 bp, Artificial sequence
  Primer
  misc_feature (1)..(41): OsMADS13-C1
gactgcatgcggaccgttccaaaattaagcacacacatttg

SEQ ID NO: 491 - DNA, 33 bp, Artificial sequence
  Primer
  misc_feature (1)..(33): OsMADS13-C2
gactccatggcttcttgctctcaactgatcaac

SEQ ID NO: 492 - DNA, 33 bp, Artificial sequence
  Primer
  misc_feature (1)..(33): OsMADS13-C3
tcgagcggccgctgacatggatatgatgatcag

SEQ ID NO: 493 - DNA, 36 bp, Artificial sequence
  Primer
  misc_feature (1)..(36): OsMADS13-C4
acgtatcgatcggaccgcaacgcacgggcacccaac

SEQ ID NO: 494 - DNA, 9170 bp, Artificial sequence
  vector
  misc_feature (1)..(9170): pNOV6900
gtttaaactgaaggcgggaaacgacaatctgatcatgagcggagaattaagggagtcacgttatgacccccgccgatgacgcgggacaagccgttttacgtttggaactgacagaaccgcaacgctgcaggaattggccgcagcggccatttaaatcaattgggcgcgccgaattcgagctcggtaccggaccgcgatcgcttaattaagcttgcatgcctgcagtgcagcgtgacccggtcgtgcccctctctagagataatgagcattgcatgtctaagttataaaaaattaccacatattttttttgtcacacttgtttgaagtgcagtttatctatctttatacatatatttaaactttactctacgaataatataatctatagtactacaataatatcagtgttttagagaatcatataaatgaacagttagacatggtctaaaggacaattgagtattttgacaacaggactctacagttttatctttttagtgtgcatgtgttctcctttttttttgcaaatagcttcacctatataatacttcatccattttattagtacatccatttagggtttagggttaatggtttttatagactaatttttttagtacatctattttattctattttagcctctaaattaagaaaactaaaactctattttagtttttttatttaataatttagatataaaatagaataaaataaagtgactaaaaattaaacaaataccctttaagaaattaaaaaaactaaggaaacatttttcttgtttcgagtagataatgccagcctgttaaacgccgtcgacgagtctaacggacaccaaccagcgaaccagcagcgtcgcgtcgggccaagcgaagcagacggcacggcatctctgtcgctgcctctggacccctctcgagagttccgctccaccgttggacttgctccgctgtcggcatccagaaattgcgtggcggagcggcagacgtgagccggcacggcaggcggcctcctcctcctctcacggcaccggcagctacgggggattcctttcccaccgctccttcgctttcccttcctcgcccgccgtaataaatagacaccccctccacaccctctttccccaacctcgtgttgttcggagcgcacacacacacaaccagatctcccccaaatccacccgtcggcacctccgcttcaaggtacgccgctcgtcctccccccccccccctctctaccttctctagatcggcgttccggtccatggttagggcccggtagttctacttctgttcatgtttgtgttagatccgtgtttgtgttagatccgtgctgctagcgttcgtacacggatgcgacctgtacgtcagacacgttctgattgctaacttgccagtgtttctctttggggaatcctgggatggctctagccgttccgcagacgggatcgatttcatgattttttttgtttcgttgcatagggtttggtttgcccttttcctttatttcaatatatgccgtgcacttgtttgtcgggtcatcttttcatgcttttttttgtcttggttgtgatgatgtggtctggttgggcggtcgttctagatcggagtagaattctgtttcaaactacctggtggatttattaattttggatctgtatgtgtgtgccatacatattcatagttacgaattgaagatgatggatggaaatatcgatctaggataggtatacatgttgatgcgggttttactgatgcatatacagagatgctttttgttcgcttggttgtgatgatgtggtgtggttgggcggtcgttcattcgttctagatcggagtagaatactgtttcaaactacctggtgtatttattaattttggaactgtatgtgtgtgtcatacatcttcatagttacgagtttaagatggatggaaatatcgatctaggataggtatacatgttgatgtgggttttactgatgcatatacatgatggcatatgcagcatctattcatatgctctaaccttgagtacctatctattataataaacaagtatgttttataattattttgatcttgatatacttggatgatggcatatgcagcagctatatgtggatttttttagccctgccttcatacgctatttatttgcttggtactgtttcttttgtcgatgctcaccctgttgtttggtgttacttctgcagggatccccgatcatgcaaaaactcattaactcagtgcaaaactatgcctggggcagcaaaacggcgttgactgaactttatggtatggaaaatccgtccagccagccgatggccgagctgtggatgggcgcacatccgaaaagcagttcacgagtgcagaatgccgccggagatatcgtttcactgcgtgatgtgattgagagtgataaatcgactctgctcggagaggccgttgccaaacgctttggcgaactgcctttcctgttcaaagtattatgcgcagcacagccactctccattcaggttcatccaaacaaacacaattctgaaatcggttttgccaaagaaaatgccgcaggtatcccgatggatgccgccgagcgtaactataaagatcctaaccacaagccggagctggtttttgcgctgacgcctttccttgcgatgaacgcgtttcgtgaattttccgagattgtctccctactccagccggtcgcaggtgcacatccggcgattgctcactttttacaacagcctgatgccgaacgtttaagcgaactgttcgccagcctgttgaatatgcagggtgaagaaaaatcccgcgcgctggcgattttaaaatcggccctcgatagccagcagggtgaaccgtggcaaacgattcgtttaatttctgaattttacccggaagacagcggtctgttctccccgctattgctgaatgtggtgaaattgaaccctggcgaagcgatgttcctgttcgctgaaacaccgcacgcttacctgcaaggcgtggcgctggaagtgatggcaaactccgataacgtgctgcgtgcgggtctgacgcctaaatacattgatattccggaactggttgccaatgtgaaattcgaagccaaaccggctaaccagttgttgacccagccggtgaaacaaggtgcagaactggacttcccgattccagtggatgattttgccttctcgctgcatgaccttagtgataaagaaaccaccattagccagcagagtgccgccattttgttctgcgtcgaaggcgatgcaacgttgtggaaaggttctcagcagttacagcttaaaccgggtgaatcagcgtttattgccgccaacgaatcaccggtgactgtcaaaggccacggccgtttagcgcgtgtttacaacaagctgtaagagcttactgaaaaaattaacatctcttgctaagctgggagctcgatccgtcgacctgcagatcgttcaaacatttggcaataaagtttcttaagattgaatcctgttgccggtcttgcgatgattatcatataatttctgttgaattacgttaagcatgtaataattaacatgtaatgcatgacgttatttatgagatgggtttttatgattagagtcccgcaattatacatttaatacgcgatagaaaacaaaatatagcgcgcaaactaggataaattatcgcgcgcggtgtcatctatgttactagatctgctagccctgcaggaaatttaccggtgcccgggcggccagcatggccgtatccgcaatgtgttattaagttgtctaagcgtcaatttgtttacaccacaatatatcctgccaccagccagccaacagctccccgaccggcagctcggcacaaaatcaccactcgatacaggcagcccatcagaattaattctcatgtttgacagcttatcatcgactgcacggtgcaccaatgcttctggcgtcaggcagccatcggaagctgtggtatggctgtgcaggtcgtaaatcactgcataattcgtgtcgctcaaggcgcactcccgttctggataatgttttttgcgccgacatcataacggttctggcaaatattctgaaatgagctgttgacaattaatcatccggctcgtataatgtgtggaattgtgagcggataacaatttcacacaggaaacagaccatgagggaagcgttgatcgccgaagtatcgactcaactatcagaggtagttggcgtcatcgagcgccatctcgaaccgacgttgctggccgtacatttgtacggctccgcagtggatggcggcctgaagccacacagtgatattgatttgctggttacggtgaccgtaaggcttgatgaaacaacgcggcgagctttgatcaacgaccttttggaaacttcggcttcccctggagagagcgagattctccgcgctgtagaagtcaccattgttgtgcacgacgacatcattccgtggcgttatccagctaagcgcgaactgcaatttggagaatggcagcgcaatgacattcttgcaggtatcttcgagccagccacgatcgacattgatctggctatcttgctgacaaaagcaagagaacatagcgttgccttggtaggtccagcggcggaggaactctttgatccggttcctgaacaggatctatttgaggcgctaaatgaaaccttaacgctatggaactcgccgcccgactgggctggcgatgagcgaaatgtagtgcttacgttgtcccgcatttggtacagcgcagtaaccggcaaaatcgcgccgaaggatgtcgctgccgactgggcaatggagcgcctgccggcccagtatcagcccgtcatacttgaagctaggcaggcttatcttggacaagaagatcgcttggcctcgcgcgcagatcagttggaagaatttgttcactacgtgaaaggcgagatcaccaaagtagtcggcaaataaagctctagtggatctccgtacccggggatctggctcgcggcggacgcacgacgccggggcgagaccataggcgatctcctaaatcaatagtagctgtaacctcgaagcgtttcacttgtaacaacgattgagaatttttgtcataaaattgaaatacttggttcgcatttttgtcatccgcggtcagccgcaattctgacgaactgcccatttagctggagatgattgtacatccttcacgtgaaaatttctcaagcgctgtgaacaagggttcagattttagattgaaaggtgagccgttgaaacacgttcttcttgtcgatgacgacgtcgctatgcggcatcttattattgaataccttacgatccacgccttcaaagtgaccgcggtagccgacagcacccagttcacaagagtactctcttccgcgacggtcgatgtcgtggttgttgatctagatttaggtcgtgaagatgggctcgagatcgttcgtaatctggcggcaaagtctgatattccaatcataattatcagtggcgaccgccttgaggagacggataaagttgttgcactcgagctaggagcaagtgattttatcgctaagccgttcagtatcagagagtttctagcacgcattcgggttgccttgcgcgtgcgccccaacgttgtccgctccaaagaccgacggtctttttgttttactgactggacacttaatctcaggcaacgtcgcttgatgtccgaagctggcggtgaggtgaaacttacggcaggtgagttcaatcttctcctcgcgtttttagagaaaccccgcgacgttctatcgcgcgagcaacttctcattgccagtcgagtacgcgacgaggaggtttatgacaggagtatagatgttctcattttgaggctgcgccgcaaacttgaggcagatccgtcaagccctcaactgataaaaacagcaagaggtgccggttatttctttgacgcggacgtgcaggtttcgcacggggggacgatggcagcctgagccaattcccagatccccgaggaatcggcgtgagcggtcgcaaaccatccggcccggtacaaatcggcgcggcgctgggtgatgacctggtggagaagttgaaggccgcgcaggccgcccagcggcaacgcatcgaggcagaagcacgccccggtgaatcgtggcaagcggccgctgatcgaatccgcaaagaatcccggcaaccgccggcagccggtgcgccgtcgattaggaagccgcccaagggcgacgagcaaccagattttttcgttccgatgctctatgacgtgggcacccgcgatagtcgcagcatcatggacgtggccgttttccgtctgtcgaagcgtgaccgacgagctggcgaggtgatccgctacgagcttccagacgggcacgtagaggtttccgcagggccggccggcatggccagtgtgtgggattacgacctggtactgatggcggtttcccatctaaccgaatccatgaaccgataccgggaagggaagggagacaagcccggccgcgtgttccgtccacacgttgcggacgtactcaagttctgccggcgagccgatggcggaaagcagaaagacgacctggtagaaacctgcattcggttaaacaccacgcacgttgccatgcagcgtacgaagaaggccaagaacggccgcctggtgacggtatccgagggtgaagccttgattagccgctacaagatcgtaaagagcgaaaccgggcggccggagtacatcgagatcgagctagctgattggatgtaccgcgagatcacagaaggcaagaacccggacgtgctgacggttcaccccgattactttttgatcgatcccggcatcggccgttttctctaccgcctggcacgccgcgccgcaggcaaggcagaagccagatggttgttcaagacgatctacgaacgcagtggcagcgccggagagttcaagaagttctgtttcaccgtgcgcaagctgatcgggtcaaatgacctgccggagtacgatttgaaggaggaggcggggcaggctggcccgatcctagtcatgcgctaccgcaacctgatcgagggcgaagcatccgccggttcctaatgtacggagcagatgctagggcaaattgccctagcaggggaaaaaggtcgaaaaggtctctttcctgtggatagcacgtacattgggaacccaaagccgtacattgggaaccggaacccgtacattgggaacccaaagccgtacattgggaaccggtcacacatgtaagtgactgatataaaagagaaaaaaggcgatttttccgcctaaaactctttaaaacttattaaaactcttaaaacccgcctggcctgtgcataactgtctggccagcgcacagccgaagagctgcaaaaagcgcctacccttcggtcgctgcgctccctacgccccgccgcttcgcgtcggcctatcgcggccgctggccgctcaaaaatggctggcctacggccaggcaatctaccagggcgcggacaagccgcgccgtcgccactcgaccgccggcgctgaggtctgcctcgtgaagaaggtgttgctgactcataccaggcctgaatcgccccatcatccagccagaaagtgagggagccacggttgatgagagctttgttgtaggtggaccagttggtgattttgaacttttgctttgccacggaacggtctgcgttgtcgggaagatgcgtgatctgatccttcaactcagcaaaagttcgatttattcaacaaagccgccgtcccgtcaagtcagcgtaatgctctgccagtgttacaaccaattaaccaattctgattagaaaaactcatcgagcatcaaatgaaactgcaatttattcatatcaggattatcaataccatatttttgaaaaagccgtttctgtaatgaaggagaaaactcaccgaggcagttccataggatggcaagatcctggtatcggtctgcgattccgactcgtccaacatcaatacaacctattaatttcccctcgtcaaaaataaggttatcaagtgagaaatcaccatgagtgacgactgaatccggtgagaatggcaaaagctctgcattaatgaatcggccaacgcgcggggagaggcggtttgcgtattgggcgctcttccgcttcctcgctcactgactcgctgcgctcggtcgttcggctgcggcgagcggtatcagctcactcaaaggcggtaatacggttatccacagaatcaggggataacgcaggaaagaacatgtgagcaaaaggccagcaaaaggccaggaaccgtaaaaaggccgcgttgctggcgtttttccataggctccgcccccctgacgagcatcacaaaaatcgacgctcaagtcagaggtggcgaaacccgacaggactataaagataccaggcgtttccccctggaagctccctcgtgcgctctcctgttccgaccctgccgcttaccggatacctgtccgcctttctcccttcgggaagcgtggcgctttctcatagctcacgctgtaggtatctcagttcggtgtaggtcgttcgctccaagctgggctgtgtgcacgaaccccccgttcagcccgaccgctgcgccttatccggtaactatcgtcttgagtccaacccggtaagacacgacttatcgccactggcagcagccactggtaacaggattagcagagcgaggtatgtaggcggtgctacagagttcttgaagtggtggcctaactacggctacactagaagaacagtatttggtatctgcgctctgctgaagccagttaccttcggaaaaagagttggtagctcttgatccggcaaacaaaccaccgctggtagcggtggtttttttgtttgcaagcagcagattacgcgcagaaaaaaaggatctcaagaagatcctttgatcttttctacggggtctgacgctcagtggaacgaaaactcacgttaagggattttggtcatgagattatcaaaaaggatcttcacctagatccttttgatccggaattaattcctgtggttggcatgcacatacaaatggacgaacggataaaccttttcacgcccttttaaatatccgattattctaataaacgctcttttctcttaggtttacccgccaatatatcctgtcaaacactgata

SEQ ID NO: 495 - DNA, 4700 bp, Artificial sequence
  vector
  misc_feature (1)..(4700): pNOV6901
cgatgatatcagatctggttctatagtgtcacctaaatcgtatgtgtatgatacataaggttatgtattaattgtagccgcgttctaacgacaatatgtccatatggtgcactctcagtacaatctgctctgatgccgcatagttaagccagccccgacacccgccaacacccgctgacgcgccctgacgggcttgtctgctcccggcatccgcttacagacaagctgtgaccgtctccgggagctgcatgtgtcagaggttttcaccgtcatcaccgaaacgcgcgagacgaaagggcctcgtgatacgcctatttttataggttaatgtcatgataataatggtttcttagacgtcaggtggcacttttcggggaaatgtgcgcggaacccctatttgtttatttttctaaatacattcaaatatgtatccgctcatgagacaataaccctgataaatgcttcaataatattgaaaaaggaagagtatgagtattcaacatttccgtgtcgcccttattcccttttttgcggcattttgccttcctgtttttgctcacccagaaacgctggtgaaagtaaaagatgctgaagatcagttgggtgcacgagtgggttacatcgaactggatctcaacagcggtaagatccttgagagttttcgccccgaagaacgttttccaatgatgagcacttttaaagttctgctatgtggcgcggtattatcccgtattgacgccgggcaagagcaactcggtcgccgcatacactattctcagaatgacttggttgagtactcaccagtcacagaaaagcatcttacggatggcatgacagtaagagaattatgcagtgctgccataaccatgagtgataacactgcggccaacttacttctgacaacgatcggaggaccgaaggagctaaccgcttttttgcacaacatgggggatcatgtaactcgccttgatcgttgggaaccggagctgaatgaagccataccaaacgacgagcgtgacaccacgatgcctgtagcaatggcaacaacgttgcgcaaactattaactggcgaactacttactctagcttcccggcaacaattaatagactggatggaggcggataaagttgcaggaccacttctgcgctcggcccttccggctggctggtttattgctgataaatctggagccggtgagcgtgggtctcgcggtatcattgcagcactggggccagatggtaagccctcccgtatcgtagttatctacacgacggggagtcaggcaactatggatgaacgaaatagacagatcgctgagataggtgcctcactgattaagcattggtaactgtcagaccaagtttactcatatatactttagattgatttaaaacttcatttttaatttaaaaggatctaggtgaagatcctttttgataatctcatgaccaaaatcccttaacgtgagttttcgttccactgagcgtcagaccccgtagaaaagatcaaaggatcttcttgagatcctttttttctgcgcgtaatctgctgcttgcaaacaaaaaaaccaccgctaccagcggtggtttgtttgccggatcaagagctaccaactctttttccgaaggtaactggcttcagcagagcgcagataccaaatactgttcttctagtgtagccgtagttaggccaccacttcaagaactctgtagcaccgcctacatacctcgctctgctaatcctgttaccagtggctgctgccagtggcgataagtcgtgtcttaccgggttggactcaagacgatagttaccggataaggcgcagcggtcgggctgaacggggggttcgtgcacacagcccagcttggagcgaacgacctacaccgaactgagatacctacagcgtgagctatgagaaagcgccacgcttcccgaagggagaaaggcggacaggtatccggtaagcggcagggtcggaacaggagagcgcacgagggagcttccagggggaaacgcctggtatctttatagtcctgtcgggtttcgccacctctgacttgagcgtcgatttttgtgatgctcgtcaggggggcggagcctatggaaaaacgccagcaacgcggcctttttacggttcctggccttttgctggccttttgctcacatgttctttcctgcgttatcccctgattctgtggataaccgtattaccgcctttgagtgagctgataccgctcgccgcagccgaacgaccgagcgcagcgagtcagtgagcgaggaagcggaagagcgcccaatacgcaaaccgcctctccccgcgcgttggccgattcattaatgcaggttaacctggcttatcgaaattaatacgactcactatagggagaccggcctcgagcagctgaagcttgcatgcctgcaggtcgactctagaggatccccatggtacgtcctgtagaaaccccaacccgtgaaatcaaaaaactcgacggcctgtgggcattcagtctggatcgcgaaaactgtggaattgatcagcgttggtgggaaagcgcgttacaagaaagccgggcaattgctgtgccaggcagttttaacgatcagttcgccgatgcagatattcgtaattatgcgggcaacgtctggtatcagcgcgaagtctttataccgaaaggttgggcaggccagcgtatcgtgctgcgtttcgatgcggtcactcattacggcaaagtgtgggtcaataatcaggaagtgatggagcatcagggcggctatacgccatttgaagccgatgtcacgccgtatgttattgccgggaaaagtgtacgtatcaccgtttgtgtgaacaacgaactgaactggcagactatcccgccgggaatggtgattaccgacgaaaacggcaagaaaaagcagtcttacttccatgatttctttaactatgccggaatccatcgcagcgtaatgctctacaccacgccgaacacctgggtggacgatatcaccgtggtgacgcatgtcgcgcaagactgtaaccacgcgtctgttgactggcaggtaccaagctgcgaatcttcgtttttttaaggaattctcgatctttatggtgtataggctctgggttttctgttttttgtatctcttaggattttgtaaattccagatctttctatggccacttagtagtatatttcaaaaattctccaatcgagttcttcattcgcattttcagtcattttctcttcgacgttgtttttaagcctgggtattactcctatttagttgaactctgcagcaatcttagaaaattagggttttgaggtttcgatttctctaggtaaccgatctattgcattcatctgaatttctgcatatatgtcttagatttctgataagcttacgatacgttaggtgtaattgaagtttatttttcaagagtgttattttttgtttctgaatttttcaggtggtggccaatggtgatgtcagcgttgaactgcgtgatgcggatcaacaggtggttgcaactggacaaggcactagcgggactttgcaagtggtgaatccgcacctctggcaaccgggtgaaggttatctctatcaactgtgcgtcacagccaaaagccagacagagtgtgatatctacccgcttcgcgtcggcatccggtcagtggcagtgaagggcgaacagttcctgattaaccacaaaccgttctactttactggctttggtcgtcatgaagatgcggacttgcgtggcaaaggattcgataacgtgctgatggtgcacgaccacgcattaatggactggattggggccaactcctaccgtacctcgcattacccttacgctgaagagatgctcgactgggcagatgaacatggcatcgtggtgattgatgaaactgctgctgtcggctttaacctctctttaggcattggtttcgaagcgggcaacaagccgaaagaactgtacagcgaagaggcagtcaacggggaaactcagcaagcgcacttacaggcgattaaagagctgatagcgcgtgacaaaaaccacccaagcgtggtgatgtggagtattgccaacgaaccggatacccgtccgcaaggtgcacgggaatatttcgcgccactggcggaagcaacgcgtaaactcgacccgacgcgtccgatcacctgcgtcaatgtaatgttctgcgacgctcacaccgataccatcagcgatctctttgatgtgctgtgcctgaaccgttattacggatggtatgtccaaagcggcgatttggaaacggcagagaaggtactggaaaaagaacttctggcctggcaggagaaactgcatcagccgattatcatcaccgaatacggcgtggatacgttagccgggctgcactcaatgtacaccgacatgtggagtgaagagtatcagtgtgcatggctggatatgtatcaccgcgtctttgatcgcgtcagcgccgtcgtcggtgaacaggtatggaatttcgccgattttgcgacctcgcaaggcatattgcgcgttggcggtaacaagaaagggatcttcactcgcgaccgcaaaccgaagtcggcggcttttctgctgcaaaaacgctggactggcatgaacttcggtgaaaaaccgcagcagggaggcaaacaatgagagctccgcgggcggccgcactagtcccgggcccat

SEQ ID NO: 496 - DNA, 30 bp, Artificial sequence
  Primer
  misc_feature (1)..(30): OsMADS8-P1
ggtatctttccaaagttctggtcatgctgc

SEQ ID NO: 497 - DNA, 29 bp, Artificial sequence
  Primer
  misc_feature (1)..(29): OsMADS8-P2
ccattttttgcgaaatgccaaatcctggc

SEQ ID NO: 498 - DNA, 21 bp, Artificial sequence
  Primer
  misc_feature (1)..(21): GUS5
atggtacgtcctgtagaaacc

SEQ ID NO: 499 - DNA, 28 bp, Artificial sequence
  Primer
  misc_feature (1)..(28): GUS3
gatcgagctctcattgtttgcctccctg

SEQ ID NO: 500 - DNA, 21032 bp, Oryza sativa
  misc_feature (1)..(21032): CL000624.108 (OsMADS5)
  misc_feature (1)..(21032): n is a, c, g, or t
  misc_feature (1)..(21032): k is g or t
  misc_feature (1)..(21032): m is a or c
  misc_feature (1)..(21032): r is a or g
  misc_feature (1)..(21032): s is c or t
  misc_feature (1)..(21032): v is a, c, or g
  misc_feature (1)..(21032): w is a or t
  misc_feature (1)..(21032): y is c or t
tttaaaggggncccmkktttcrgggttgtyccggggttttaraactgrgccargaaagtmtggcaaaaacrgtgaactgggsagwttttngrccttttttgctktcragkgmccttggtatctataaactgaataacctgnggattacacacaatcgacatattcagtattgaagattgcatgrgaacttaaaatgaacaagcacatactgtaacaagacatgacataagcaattaaactgtcgagaacaattatatatataagtctcttttagtctttctgcaacttcactggtaggcaattacctatttcactggttgctactgagtcaacaacctgtgcatatccgtagttgtttttgaccccaacaaagtcttcattgataacaggaaaatccattgcaactttctcatctgtaagataaccttcttttgtagttccgcttttcaagtttagcctccattcatatggacgagaaaagagagtgccatctactgatggatcaaaaccttctgaattcttatctggctggagaaatgctcttccagaacattttgacttgtcgtcatcatgacttgcactagagagtaccgaatcaagtgttcgacaacctctgataacaacctgtttacaggcttttgccaatgagtataaatagacggaaaaaagcatcgctaatctatattttctatgagattatcctcatgtatgtgacataaacccttttatgttgggaaaattagaatgtttgaaccacaagaattacacggaaaaattgttctattagattgattttctgattttgtttctgtactctaaatgcatctatggtaaattaatgattacataactaggtccatctgaagtttctataagcgtaatatcgataggatttttggatctcgtgtgataatttaatacatgaatactgattttgtaaaggttctagcgaaaatactggaaaaatagccaaataggcagtccatagctaagtaaagctaggtagttagcatgttgcacactacaattttgattcataaggcaaaactacagcagaatataaagctttttctggataacagctaatcatatccatatatttctctggaccaaaattataagaccatcaattgaaatagcagaaagattaatccagaatgtgtattatagttgcctacagatttttttaaaaaacgatttcagtatggtgaacatatatacaagtgcagctacatgcctcatgcaccagatccactcatcccacctctagtatgaaattatcagtagtgttataaaaaaaaagaagcaatgtctgttctgaacctccaatgaccattaaagctgtttcatgatccttaattttatcttttgttaaaattgaacaatcacctcatttccatcctcaaagcaattaaataaatggtaactgcaatgattctccacatcaaaccagatgatggaatcagcatcaccaaacctaggcatcactccaatgcgtgatatcccgcccatatcattttggatgaatctgaagagaaacataaccacattattatggattattaagtcagtatgcatatttcccacagaagtggttgtcatagtaaagatggtgtatatgtatgggacccacggtttgcgtaaaattgtccttattaagccgaagtggagaggatagtccattataatattgtacctacaatataataattagtagttacaagaaaacgtattgttgacagcaatataagatctcataaataaaagctagcatactgtgcagttactccgatgtcatgaatgagttttccttcctcgaatttgagatcgaccttgtgaagaagcctctcaccatcagctagttcatgtgaaagaacatcacttaataatattgtaataaaatctaaaagatcatttttgcccacaataatagcaagcaagacacgtgtgtggttgagaaatttatattggttcttttgatacaatgtttgttgatatttctaatcttatctagctgtctttttttttcatgtaactattgccagttactatagtaatattgtgttccgtttacactttatttttattacttatatgccactcgataatttgcaaaaccccagcctggacaggcgctatcaaacaaggttcaacatggtggatctgagtgcatgtgctagttaaaaatacgagttgcatataacaaatgctacaaaaggttggtgtaatatactctccctgacccaaaatgtaagggattttsggagaywtgcatatcccargactatgaatctggatagggagcacgtccagattcatagtcctagatgtcgcatccacccaaaatcccttatattttgggatagagggggtagcccattttcatgtattgttttacacttgtctagtgattgcatttatgttccaccaaatcacaacttacaggaaattactccaagcacatagtggggtttttcaatattagttcccatcgtcacgagttctccacttccacaaatcttctgtaaataaaatcatatgcatgtaagcccttgctatagatgaatgatgctgctcacaacagaacattatgaacaatttgagtaactttagttggcattaaaaatattccaagaacattatgtgtttgaactttgagttgatgatccatgcttcagtaatcattcaccatgtgaatttgtgaagttaagaaatggtggctgatggattaattgatgaaagatctctactgaaaattattgaataataatattaatatatcactggccttgcctactgttcatactaaaacatcaaacacacatttaaagaaataatgagcaagctgtaattgcataatagaatacctttgggtggctagtgaaaggttggtcccaagctccattaatgttgtaaggtcctagggtgcggagattattgatgtcaatttcgtaaggtagatgattttctgtggcagcaaaagctcgtccagcatgctgaaatatggaagtatttgcactgtccttcacaggctttccaaatctcacctataaatatcaccgaagatgatatgtagtgttaaccatcctcaagaccaagtttaaacaaaaaaatcatgtgcatctgacaattatatagctactcaaattccatgagaaaatgattcaacagcggcattcagctttttccactggagaaacaactaatttgttgagtttcagatattatgtaaatctattccactggagaacagtggaattttttacatctttctcatgtcgattcttcttgtattgaaataagaatatttttttactatgcagaaaaagactgtttcttatttatttgggtatgtatattggactgccttttcttatgcaatgcttatgtcacatccagtagttaatctgttctagatattgatttaacctgcacatcatattttcgccgtgcatctgcacatcatattagagctcaattatcctatccacctagtgtttacacttgatctaatactaaactatttaaaattaggaagacttacggtattaagaagaaaagcaaccagtgttgcacatggctcgccttcagcagatggaaggaaagctattttgttcttctttctctctaattcaaaagtgtctgtgtccacatatttgttcttgtacgaaatcctccattctcctaaattgctcttgctaaggtagatagcatgcaacattccatgtccttcataatacatgtatgatgttgggccaaagatggactctgcagctgtctgtgatgcattaagagggtttggacctgttcaaatagatcaatgttacacgtgcatagaagtttagcataaatctgattcattattaactttttttggttggaaagatgtatataagcttgtgagcctggaagtatcagaactcaccatttcttatatagacaccctcaggaaaatcttttggaacctctccattgagatcgtcaatgaaaacctcatcaccaatttcgtttacaggtccaaaattcccctgtagaagactcagatgaaaattatgccaaattgatgagtcagataaattggatactacaaaggagatggaaaaaaaaagttgctcgtcgacttcacaaatttgatgctgaacaatgtcatgtttgcaaattatatagtagcacatgcatacattaacaatctttatatttacctcattcagataaggctgctcagaaaacttgtacacggagtcgatgaatcggtccagcagatctgaagagactgatttcagagcttttgtcaattcctgcatcagtggctgcttattccacccagtaactgaagattgcacctgaaggatggtacattttgaggtaacctatcccttcttatattgcacaaaatattgacttaagaaaaacaaacgcagagatctgaaggtcctattgaggtagatgtagctttatctcaactgaagaacacaaatttgttacaacacattgaaaagtttctttgttttttttcttgggagaacttacaacacgtttcaaagttagtacttgaactgcttgctggatacatgtaggcaggcatgttccatccattggtttgtctggagacatcaagttaataaatcattattatttccagattagttaccttgacggcattaggtggagacaatgaggaagcttgatcagctgggctcttccctagatgaatgcatctagtgacctgggagctgcaccctccagctctgaacatggcttgctcaggttattcgatcctctcttgtcagttgtaaactgttactggatgttatgcctgctagttcgagcttgttgcattataaagtggaggagcagtaagccagtaaggcatgcaagaacacagacaaatatggtttatcccttgctatgcatcggccatggggaggaataaaatggtctgattggttcagactagcttaagagcaaacactacagtagataaggagcatattcttgatggtcwgtgggtgcaataagacagggttaattaatcaagaacaagttgattaatatatggtcgcagaaatcagttctggaatcaggctcaacaagggatgcaagtgcaactaggactgatttagtcatgtagtgatgtagatcgtgatttgtgacctgcgacctttgtgattgatttgctgctgggttggcagctctgtccgtgctatgagctcgtgaatggaaggaacaccagtggcgaatcacaatgacgctcatcaggtcaatgtcttttttgatgtaaantcaggacatgttaatcacgatgatgctcatcaggtccatttcttttttaaaagtaaaatctggacaagttaatcacmacacsgctcattaggtcaatttcttttttaaargtaaatcaggacaagttgtaccacatggaatttcattacggaagtagttcaaattaggctggctttttgttgtctaatcactcttgttgatatgtactccttccgtatttaaacatgtcattgtgattttattagtttgtggaaatataaaaatcgtatgggtccatttttccttataattttgttagatactatcgttatatttaaatacgaaggtagtggcataattgcagtgtaaaccccccaaaaaactgaagagatgcaggttttttgtacttagcattcgcaaatacagtaagagtttggttttgttcgtacatacatgcacgtatatacaagttcacaagaacagcagtcaaatgtggaccatgcgcaatggacgatgggttccaacttccaaatcttagtcgggccgttgcttcaccatgtgggctaaagatgccacgcgaccaaagcccaccaccacaagtggaccaaaagcccacataaaccgagggtaattggaccgacccaacctgggcttcccacatgggcttaaacttattcgcgccttctccttaccaggcagcccatcagaataggccagccgcgtattcatscaatscwvagattgagatggactattattacgcatcatcaaaatgttaaacgaccactttcaaaagaaaaaaaaaagagcattgtacttgtacgaacacatataccttcgttgcaatcacaaattcgcaatcaaaagatccaagttcatcacatggccaactgcgcgagagatgacacaacacggctgaaccgctaaaaaaccgctacgaaaatgttttaggatcatctgtgcattcttctctgtttaaggttggtaacagagcatgcagtgctaccttcgtctcgggctcgtggcacgaaccgccaaaaatcgacggcgatatcaacctcgttttgtttgtgaaacttgtatgtccgtggtaggttgtagcggagctggaacagagggaaatacagattatcatagcaggaacaaaactggaaacagaaaacatatgttttgacccgtaaagccttaaatgtagaataaactcatctagaamccaatcaactttttgccggatttcaagcaaaactagaattgctagtcaagtgttatatcccggtatttcaaataatataaagaaaacaggtgcaaaaatggtttaaaaaatcataggtagctcaatatcgcatttcaccattctatttgcccagatttcctacagctagcaggcactgaatacatttggtcctccaaactttactcatacccaaatgtctgattcagtctaaatggaagcaagaaaacmaaaaaaaaattaacaggataatttatttactacttccccattgaaatactgaacaacatttttagggggtagatgcacaatacaaaatgataagcgcctagcatctatttagttacctcacatagaacctcggcacttatggcattgcagttgcgcaaggctaccttcttgatgtgctaaagatcagacacaaaaaaggtggacaaaaaatcaattaataaaacttccatgctaactacaagatggaacattgataaatatggttacttcttgttggaaatacactgttgcaaatagagaagggaataatcaaacatttatcatcagaatctaataaaataaaagagagattgtttctgacatttgtaatccccttgaggaacacttacttctctggtagaagtcttgtgtagcgaatagacagctcgagtggcaacctgcaaatagcaatagatattaaaaattttaaacatcatgcaataatctcagtcatgtgtatgatggcaactgctgcccagtgccctcaccttcatgcccatagaaatgaattccatgtcagctccttttctgcttgtcccaaagggaggattcatgacaacagtgtcaacaagaaggcctacttcaacaggtagctaaaagatcagggaagcttttcaatgttgaaagcatctacgcttatgtgtataaatatatgattttgtttcaataaccattcacattttttttgtgacactatattatctttcttgacctgaacaatggtgcacaggctattgaagtactggagagaaagtaaatagctgactcgtatagtagcatcagctaggatactactctggatatcttctctaggtgctatctacttatgtatgaaataacaaataaataacatgcaacagaaaaaaacagtgtgaaaaaaaaactatgagaagatcagaagcaataggttatatagaaaaataattaaaaaaaaaactgaactaaaggtgcacttaaactaggtagagtatgtcatcatttaaggacaatacctctcaaatttaaattctttatatcacactgaattaagtcgatatccagctgcacatcaaacatttaacaaaagaaacatgtcattcacatagtcaagtattgttactgatcctagaaataactatccctgtgtccaaaaatatagctgtttatggctactatattttgggacagagggagtgatacattaaatctgagtctctgctttcagccctactttgccaacatttgcttagccatgcaaatttgaccactaatactaaagaacatgaatagagacagagacagtaaaacctatatttaaaaggataatctagacagattagtagatcaattgaacagaacaaaattattgcatctttacaaaagaagggaagcatactaagccatttatgaaatttctatgatgcattgataaaaataatccatggcagtagtacatataaagaaatgcaaactgcaatatttgaatataaaaaacatctcagatgtggagaactgaaaacaaaaatcaacacctgtagtgcatttcagtagttgcagaaagctgatttaagcatacaactttccacaatgctatttggcaggaagacgccattaacaatttgcactacatacagatgagaactatcagaaaattatgactacaataacatgcatagtttggtggtgatgcaaggaggatgctggaaaaaggtgaaaacgagagggtacatagacaatgtgaagatttttcaactttcaggctaaaccaatggttatattcggaaccaaaaaaatgctatacctctagatctgcagcattttcttgagcaagttncaagggattgcgggtcaatatcaattccaacaacatgcctgtgattcacaaccaaagggacatwagattggaaattgtaactgaacaattaccaccaaaaggcataaagatactgagtgatgaacctcattttcttgtttctaatactaatcgacgagcacttaagttctgtaactaatgtggtgagcaagtggctaggtgaactaatgtggtgatttactgtccactaagttctgtaactgatggtatatcaacacacaagcatcatggacagatatacttattaggtaaagcttaaacaagggtaaaacatatccagacagcacaatcagtcaccatacagttctccattttagatacaaccattctccattttaggtcagtgagtgttaatatgcgacaatgtcacatgatgttcagtcgaattgaatataaaagggcaacacctttgcacagttaacaaatgatatctttacaaatatcaacacagaagaaaccagttggtcaaaagaaagaaaacccaaggatgtgggtgtccaaatcttaagatcttaaacatactcactcagcatccagcagagagcttgccacagacagggtgccacacccgcagccaaagtcagccaccactttgccagttatgtcatcaaaactattctccgcctgatggatttatggaatcactatgagcgagataaaaagcacaccagaacaacttgaatgttagcatctgaacagcgcacatgccagccatctactatttgtcaacttgatactgacaaaccacaaaagtagacattgccaacggttgcaacctgcaaatataggtgatctgccgaaacaccagaacctccaaagtatctacttcgatggacatcgccaaagtttacactcgatgatggcttatcaaaactaaaggctcgaaagaccaactacatgaataacaactattctaagaatttcaaagcactaagaagtctgaaatcgctacatgcctagaggaagagccactctactcttagccatgaacctactactgctggtatgctgcttggtcggtttggacatggaaccaaagctgctgcacttgacgtcgcccaattccactcacatcacaaaaggaagaaaaaaaacagcaggatcgtattcgaagaccaaagcmaaagattaaaaaaaatctacactctagtataaagcacaaaatcaaagcaggaaactacacggggaatcggaacaggatgctactactaccgtgtagagcatccgcgacgcgatgtgagggcccgttgcatactgctccagctccacctgcacccaccgascaccaccaccaccggcggcggcggcagaaaaggtcagacatattcccgccaccactttgggcggcgatgcgaatcggaagacaagacgccggcaaagtgagtgcgcggcggcggtaaatttaccttgggtgcggtgaactgctgcaggtctccgaggagaccctccagctgcttcagcttcatctcctcctcccctygscgccgccgccgccgtcgtcgtcgccstggaagatggagctctctctctctctcccccamtgccgggccsgaggctttgccttttttcttagggcsgcgcgggtkggaccgggagattgggcccatatggcccatctctaatgggccccgctacattgattgggccacgttgggtcttgggccggataggaaggcctaatacgagtgagtgggcctattacatcatggtcctcgtggataattgggccgataaaatgggccgcstgggcsgtggagtcgaaacgtcccgccgccgccgcggccgtcgactgcgccggcgaactccgcgttctccggatgcgccgcgccgcgggktgggggattttttgcgacgtggagttcgcgccgcgcgacgccggaggtgagtgctccgcccaccgtcgtgctctcctccgtttcgaactggcaattgataagctttgatgtctaggtttcggacggcttatgaagttgctgaactgggatgcgaccattttttttctccgattgaattttgaagcaattcagtgcaaaggtaaatggcagggatttgcaatttgagatgctaatcttttgtccctgcaaggtgaatttcgcaacatttctgtgcaaggtagtggcatgaatttgcaatttgatagactaatatgtgtccctgcgaaagttgaatagttgaaacaattttgtgcaagctgttggatatgctttggatcggtttggcacaaagtggaaccacaaattaaaataggtttggatcataccttgatctcccggagttcccatttctctgttgtttgttcttctttcttttcctcttgtttggaagcacagagaggagagagatgtgctatggctcttccctgtgttctcagtgggttgctagatcgggtagcgagagaaatctcttagggtttaatacttaggtgttgatttctatttatagccactgcacacagggggaaccgacactagtggaggcggtaaatcccccgatcagggactttcttgaaggggcgatcactgtagcgattgccctaaaaaatctttcttgccgactttggtttagccgcaagatcacatttgtgttcacagtaacacaagctagtgccatgaatttgcaatttgatagattaatctgttgtccttatcgaagtgtcaatttaagttttgaatggtttctttacctcaaaaaaaaaaaagtttataatggtttcatttacattcagtaccttggtagtacctggcaatattattggtcattgctcaagataagtgttgaaacatgatcatgtataggcttgattactgaccggatatataggtttcttggtctcatttcacaagtctttgcacaccttaattgagacgtttagtatatctgcatcacatggcatgtaatccagtcttactcacgactaccatgttgcaatgggtgggtatgccacgttttgggagtaatgcatgcttaattctctcttgcatgaagtaatctattaatgaaaccaaatgaggcgccttaactcgccaattaatggaaacattaaactctatttagtcgtggtgtttaagtttaagggccaatacgttcttgtctagatatattatgacatgttatgcctgtgtctcctcccctgaaagatgcaggcaaagaggggccatatttttcaatctctctccccaccccctgacttgagcttctgaaatccaccatggatttcagttgcttgcagccacattcaggaggttgtgatgatatgccatttgattcctatgtgcagcaaaatggccatcaggagctccatcttgttgatcatccattcaacaatgtcactgacggccatgaatactattctccatctgctggtggatcttttcttccctttgcaacctactatgatcttggccatgagtactaccctcaaggaggagaaaaggatgctgtcgtcgtcgatcgggcttcgccgactattcgtaaagcttcgcctcacctgcctctcttcacacctaaatctgaggtttctcatctcataggaggcggtgtcgttggatcatataaggcatttgagatgaattctaggcttatccggcgcaaaagggcttcgggtaagtctctgaagaaggctaatgttgtcaaaggccagtggacattggaagaagacaggtaaactaaactaaatttgtccatgcatgttctgtttaatttaacctctgtatgtccacctaaaggagttcatggttagtaggacataggattgttcatgttctccctagtaattgacaaatgtaaatgaattgattcttgcgaaatttaaacaggaagcttgtgaaattagtcgaacagtttggactaaggaagtggtctcacattgctcaaattcttcctggaagagttggcaaacagtgcagagaaagatggcacaaccatttgaggcctaacatcaaggtactctgtgctcctacattttgtttgtccaagtactgtttcttaatttgaaaaggatataatactgtctatttcgatgctttcagtgcacagaaaagaaaatgttcttgtgaataatgcccctgcatttcaatgttgttcgatatttccttgttttacttattgcttgtttgaacgaaattcctcaagaaaagccaattttgatacattcatatcaatgctaataaactccccaatacatttattctcccttcacaaccttgagataaactccccaatagaatactgtctattttgaaggtcacggaatctgaacgcaatgtgtaaagtaaatgtttgaagctagtcaaagattaaaaactggtctaagagagagcattgaatattgatttgaatacatttaaatcaatcctaataaaaaaattgaccttaaactatccctaaatattttcctatatagcattcgatcattttgattagcccaacattcacaagtgctcaaggacagtttcttcttgataagcagggagccaggataaggtggtgttctaaatagaaaggaagccacagaaattaggaacaaaaacgcttaggaagcatcacagtagatgagaattagaaaagctaaatatcattttgcaactgttaatatcaaggagaaaccaataaatctataagaacggatattcataaaaaaaattggcatgttcctttttaaaaataaaaactgacatgttagttttcatgacaatcacactttttatagagtttccatgcttggaataatccttctgtgtaacaaaaaaaaatgcagaaagatacatggagtgaagaggaagacatagttctaatccaaacacacaaagaagtgggcaacaaatgggcagagatagctaagcacctgcctggtagaacagaaaactccatcaagaatcactggaatgcaacaaagagaaggcaattcgcacggaggaggagccgcgctagctccaagaaccccaaatctggaacccttctgcaaaactacatcaagagccttggaattggtccaatcaagtcaagtgttcgtcaagctccaccagaatctactgcagtgtcatcgtcttcaccagcatccacacaaaagttagcagaggtgaatggtaagatcaggccagattccaacccatccaaccaaatggtcacccagggaatactcaccatggatgagaacagctacatccagaccaactcttgtgaagaactcctggtctctacctatgatgatttatgccttgatatgtgtgatcatttgttcgaaacgaaggacgagatgccgtaccaggtttacaacatagatgatgatgttgacatgaactacatcttcaaccacattgattatgctaacaagattggccatgagatagatatggaaatggcatgggacgatgatgtcctccaagacgatgaatcagctggatcatcaccattggagacaccggcaggtctagcacaaatcaataccgtgcatgtgaaggaggagatggatctaattgagatggtcacacgcacacaatcttgtggctagtggatgagaaaataagcagtgatgtaactatgtgtgctactaaatacacattacacgacctttcggagtgcaacctggggaacctatatggtgaagaaatattagaaaaataagaaaaacaaacatgtatgggttcgaacgaagcacttgattatatattatattgtaactaatattctaagtttttctcttcgtacttttggcatgcactctctctttaataagtactttatttttaccttttcttacattccaatttactcgttttatctactcacacttaattagttcatgctgagaaacaactagtgtggtatactcacatatattgaacacagaccaattaaggtaagaattaggcaacataattataagcatatatctaagctgacatgattagtggtcagttaattgtttacttcgtatttattaattagtaacaaaacatcttcattacatactgaattcagactaacatatagattatgttcttgcagcattcatcaatcaaaccgggatcattcccttgttcagttcaaaagagcctaaacaaacgcactaaatttagcacacacacttaaggtaaaacccgcatgttaaagagagcatttacgtcaaacaccacatccaacatagggagatgtccattaatgtgataagcaattcattcattggttgaggtgatccatgtaagcttgatacctgcatgggaraagggaawtgacgaccgaaattwacmccatatattttaaaataaaaaaattggaccaatctaggaaggagtagattgattttgaattaaggagggggtgagactcaaacccggaccggctagttcgcagcttgcgttgctagccggaaagaccccgggcctttctccaacaaactccaacataaattaacacatatatttatgttaagtatctaacaaactccaactaaaaagaaaatgctttttaaagttctggacaaagttttagtacacatcatcgttcttcagtccctaacagtacgacgaactactttttttttatcttgccaaatttagttcattaaactctgagttaaacttgaagctagctagtactactaatttataatagtgccttgtctccttttgccccacaatataggaagcgaaacatatgtagctcacattgaactttgattaattagtgaatattgatttagatagttggtcaataacaaattagatcataacttgtatgagctgaagtatacaaattaccctatatgcagggaagggtcacaaattgcatgatggagaaactcttggttagcttcactagcatggccactgggccctacatcttggcaagatatatgaagcatattttctccactagtttcttgtatctgttgcaataaaaaagatttttagttaagctgaaagaactgcaattccctttttaagtatatacacaagcaaccgaaatgattcagatcacttcaatatttaaccatgaatttaagaacattatacatccctttgccttgaaaatttaataatattatttggactagtatattaatatcaaattaacagctatggggattcacagtaccactgaatttgagcaaggccattattaatttgattgcaccgtctatatttctttagataaataacgtgtaaccgagcagcaagggattattatattgctcatgtgagccttcagaacgacagcaatcggaagctagttcgagaaaagagtaattagtttcttaatttattagttggattttctacctcataaatacatttgatgtattaaataatacctctgtcacaaaatataagaatttttagggctggatatgggtattaaggaagtaagaaaattaaatcggaaaatgttgataagataatttagatggagaagttgttatatttggggatggatggagtatatgctaagagaaatttattgttcattcttattgaagctacaaatagtttccctcaaaaaaaattatcacatcttttttctatgtgtttgtacatgtaggatatgactcgatcgtaggcacatggaaattatataacatactcatgctcaaggctagcagctccggagagagagtaatataattaacgtttggagttttatcacatatggagtatatatactaatctgtatatattaccttcctttttaagtctttattagcatcttgaagttgttgttcctgcaaaacttatcagttattatttctggggactagatagtagtcaaaagattaacgaaaacgtacccataaaacaaagacagcacacacatggattaccttacgtttgagctcaaatacttgatcaagcaactgttgattctgtaaaaatgtatatacaaatgatttaccagcaaagtttgatcaagttaaaatttgatgtttcatgtaatacttgcgtaacaaaaccaaaaaaaaaaaacagagcataggtaatatataacatataagatggtgtatatgatgtataaagtactgtgtcaagcgggaatcaagctaaatatgcgtcgaaattaatatgattcatttcactatgtaattacctttgatgacctgatattcatgagggatatctcgatctggttctcaagttgctcgagctccttcaagctaagtggaaccaagtcctcgccaagaagatttctgcataagatcagagttagtccatgtgtgtaacatgtagaaaagctttctgagaagatccacgtgcatacctctgagttgtttgtaggaactcaactcttgtctttaactttaagtactcttggtaattgctctatatgaatgccaaattagcagccaaatattaattgaaagaaaatcatgattactatgtaaaagttgatgagttggaatatgcctggcatagaactaattaaattggacatgagaaattaattaattaattaatagacaaaacttaaaatggtaatggcatatcatgaagtatatacatactgcatattgctaattgttgtgttagttgacaacagaacttatttgttacttcctccgttttatattataagactttctaacattattcacattcatatagatgttaatgaatgtggacaatgctaaaaagtcttataatatgaaacggagggagtagatatgtagcatgcatgcatggataatacttgtttcgtcctcgatatatacatatatagctgctgttcaaaaggggaatataccctgcgcagaatgtactgtaaaaatgtaatttaaaagacaagtctgtttaaaatatacattaattaacctatcatgtctagcatattatacatctatcatgcacgaacatgagaattatgtaaaattttaagatatcacatacgttttattaaatattatgtatggcagtgtacacatcgatatttccttgtaaacaataattgtagcccctatcacaacgtataccagattgtgttaattacataacttatatccaaaacaagcctgattctcctttattaacagctagcagcagttgctgcacagatagagatgattcattagatctaaaaatatgcttggccacatagatcctcatgtttcaactaatgaccaaattaagttcaattctttgaaaaagtttaaggaaccatagtttattacaggtgaattgcatatgcagcaatcatattcagaatcagatggttactagttcagtttccagtgcagcagatgcttcacatgagttaaggttgtagttgcaactgcggtatcgctccagtgtcttgtacatactgttacaaaaaagaaaatcagtggaccacaaaactattttcaatgcagtatcagttaaagttgttatattatattttgttgtttaaatacatgtatatacaacccgattttcctacatatgcatgatcagtttattttgcctttcataattaatggagcatatatcagttatattttctagggtatgtgcacagcgcaccctaagtttggagccagggttttaaatttcgaaagaaggatttctaccgcaggtgggcgatataaccaaaatttcagatttttttttcgtacgattttttttgaatttttgactgattttgaatggatttgaataaaatttgaccaaattcacaaaaatttgcaaacaaccgaaagtttcgggcgagatatgaacatttcggtgggggcgaaatttcgagccgaaatttcaaaccctgtttggagctataaacactatcacttacaaacatgtatatatttgattgatttgtgttaaattattagaaaattgtactctgtttttttagaaaaaaacaattgtaactaacattcagattttgtttcaaaataagtgcaattctaaaggagtgcagtactatttttccctacaaccacccccctcattcaaattatgatccctattttacccccaaccacaatttcactcccaatcattttacttcttgctaatttgtcttttaaatgctagagttacattattttctttgtggatactggatagaaggagtatattttttggggagggaaaaggagggagtacattgtgactaggagcttggaaaattcaaccaatccaaacttttggtacacaagtactcctactacataccctaacggtagggtagctagtaactgtgccttgtaaatcgacacaacctcgttccagactagctagcctgtactgtgcgctgacagaaaattttggcaatcgacacgcacgcctctcgcacgataagttgtttgcataccatatgacaatgttcaaatgatcaaatcaatctattcgcatcatcgcatgtgaaattatgaatcgcataggagtatgaaattacgaatgcagtgaattaacttgggtgtgtgtccggccacgcctagctagaaatcaattcgatctttcgtaccacacaactacaactaggctgtgtttagttcacaccaaaattagggtccctttgaatcgcaggattgaaaaaacgtaggaataggaaaaacgtaggattttggtaggaatgtaagtgtaaaacagaggattgcaaaacgcaggaaaaacacatgaatgaccgtttgattgaaccgcaggaaaaacgcaggaattagatgagagagatagactcaaaggaaagttagcaagaggttgaagctcttgctaaatttcctccaaaatctctataggattgtccattccataggaatttcaaaggattggataggattcaatcatttgtttcaaagggcttcataggaaatttttctataggattgaaatcctctaaaattcctatgtttttcctccaattcaaaggggcccttagaagtttggttgaaattgaaacgatgtgacgtaaaagttaaaagtttatgtgtgtagaaaagttttgatgtgatgaaaaagttaaaagtttgatgaattattttggatctaaacacggaccgtgtacatatccacagggaggataacaaccgacgagacgatcgatacagagatgcttatctccacgagtactcctacgacttttcctcctgctgctgcattactacttttcctcttgcttctgcagctgcaatcgcatgcacactagtacagccgagacatttgacaagacgtagagagagaaacctagctagagagaaagagagagagactcaatggaacagtggaacccaagaacaacccctatgttgcgagttcccaatggaacagtaaaaccagagcaagaaaccctcccaacttgccattggaaaagatgctcctaattaagatctgacaaaaataacttgccattggaaaaggcactgcagcctagtatatgtgcttgtgcaatatgagaattaagatgcaatatgcgtactagtagtactatatgccatgttcttgtgcagatctggaggggtctcatctacttcactctgaaaattgcatgcactaatgaaagagctagagagacaagcatggaagagatcagcttagagatatctagcatgcagctctagcctacaaatggaagcaagcatggagagattgcatgcttgattctgttgacagagtactagtctctatggcaactgcaaaccgtaaagaggaattaggggacggcaaacacacacagatcggcagccatcaggtgactagaacggctgtcctgtctctctttctttaaccaaaacaacaacaggaacaggttagttaatcagctatgagcatgtatatgatcacgatcgaggtggtaaaaattaactaaaatcaggatctttgagaaagattggtaaaaattccaacaaatacaaacgaaatgctggtatatatatgttttaaacacaaacaaagcagcagggaaaagactgggtgtaagaacttcccggacaaacatgagatgttaattaaacacacggactgatgattaattagaacatggtagctaggtgggcagtagctagcccagaaatcacaaggagcttcaaaaactcataacgagaaaactagtctttcttggctgcaaactaattaactaactttgcattagaattagggcgagatatatatgaattctctgcaaggggcgagagcttgcaagagagaattattagtagtaccaggaggaggtggagaactcgaagaggcggccgcgggtggagaagatgatgagggcgacctcggcgtcgcagagcacggacagctcgtacgccttcttcagcagcccgttcctcctcttcgcgaacgtcacctgccggcttatcttgttctcgatccgctttcagctctactttccctcgccccatcgatctctctctagctctctctcggkctcaamatcwctcttgatctatmwcctmactctccttgcctagctagttagctgcagcctgcaagcttccctctctctccc

SEQ ID NO: 501 - DNA, 170371 bp, Oryza sativa
  misc_feature (1)..(170371): P0681F10 (OsMADS5)
tcacggagcgcgacggtgcctggcctgaagcggtgcggcttcttcacgccgccggtggccggagctgacttgcacgttgccttggtcgccagctgcttcctcgagtccctgacttgcacgccgtctgcttcgtgcgggtctgtgtctaacttattatacgtcaacaaaaccaatcgtatgcttctagatctaatttaattcgatttttataaatcaattaaggatttaagattttacgccgtgttcggaaggagggaaccctccccggaaaggctaatgggcgggtgatcgctcccccacccgcctagcgatcacccgcccaccctctcccctatactactagatgtactcctccctcttcccccttcctcatctccttctcctctttcagtagaccacacaaaattttttgaaaaacaaaagttagaaaaatttatgtatagaaatactatatataaaaaatttgaattcaaattcaaatttgaatcgggtatgtaaacttttgacttataaactttggatctataaactttagatgtatagaaatactatatatagaaaatatttgaattcaaatttaaatttgaatcagatataattaaaattcaaatttgaatcgggtatataaactttaggtctataaactttacatgtatagaaatactatatatgaaaaatatctcaattcaaattcaaatttgaatcggatatttgaattcaaattcaaatttgaaacgggtatataaacttttgacttataaactttaggtctataaactttagatctataaactttaggtgtataaactttatatgtatagaaatgctatatataaaaaatatttgaattcaaattaaattttgaatcggatatataaacttttgacttataaacttttggtctctaaactttatatgtgtaaactttaggtgcataaactttaggtgtataaatttactaaaataggaaagtaatgcgatgccaaaaaaggaaaccaggtggagggagggagtggggagcgaatctgatcgctaccccatccccacggcgatcaatcgcccattaggggtaccccctccctcctggcacgcaaaacaaaactcgttttgttgcatgattaattaaatattaattatttttttttataagatagattaatattattttttaaaatattttttatatagaaaattttttatatatcattataaaaaacgtgcgcgtgaaaaacgagaaaggcaagttggaaaaatggtgataaagaacaaagctttaatgatgaataaactcgacgtaaaatatacgggccagtaatttacaactgtattgggctgattacagacctaacaggatcttatggtgtatttggataatgggaaatgagaggtgggattgggattgaaatataaataaagagttaggattaaatggaagagggagaatgaatggttaagatttaaagatggcttttggtgggagggaaatcatttccataacccattagccaaacaaggccttaatgtgaagggtaaatttgctacaggacactcaaagattgtggtctttgctgtgagacacccgaagatcgtgtatttgctcgtgaacactgtaaaaaagtggtaattagctgctggacattcttcccattattttattatttccggtcaagatggagagagaaagagttgtgtaagtaccaaaatgcccctggacactgttcttcctctctctatctttttttccccttcttcttccttgcagcagagcagaggtgcgagtgtgcgacggcggctggcccgagcttggacggctcagccacggcgaggcggcggcggggcggtgtaggccccacatcctttctttttctcttctttctctcctctctcgagcaggcgtggtggcagacttgcgtgaggcggccggcggcggagcagggggcgcggcgctggagagagggagagagacggccgacgcgatggcgagctcggcggcggagagtagcggcgcgcggcacggcagcgggggagagggggcgcgcgcaccgcccgtcctccatagcgatggcgtgtagcacgttcttgtcctccagcgacgccggcgtgccgacgtcggaccacaaccaggccacgttcttcttgtcccggaagtccagcaggatgatgaaggaggtgtctgtccgtaggaacatggtcgctgccatgagcgtgctcgtgccgtcgagccactggagcttgtcggcgtcgccgagtgcacagcccggcggctcgtagaagaagtcggcctgctcgccggtggtgcagtcccagacgccgatgccacctatagctgactgaggtcttatgatcattgtgacaggatgcaccctgcatccttaaaccgtgacagcctctgcaaagccaacctcatacacactttgctgctcattgctgatcgatcacatgatgcatgatatggccattcatgtagagaagaatccggacaagaataactactagtggatcatggtgcagttgcagagattggggaggaagaagaacactcaatgaatgtcccttgttgcccgagacgcggccgattcgcgcctgccatctccagttgtacacgcgcgatgcggaagaggtggcgcgggtcgccgggaaggcagttatacacgcgcaggtcgccgccgctcctccatcgctcatttgtacacgcgcacagcgctgccgtgcgcgacgcagcagccgccgttgggcgcggcgcggacagccgtcccgtcgcccgcggcgttccctgccatggacgccgccagatgcagctggtccccgtcgaacggcccccaccgtgcctcgcggaagcggtcgaggaggccgtaagagagcgaggtagagcgcctcgcgccccccggcaaaaccttcgcgttgctgtcgaagaagaacagagaaagagagattgacaagtgggccatggacaaacttgtctttaacttaagtttctctctccgttttcatcgaaaataataaaataatgggaggagtgtccagtagctaattaccatttttttaccgtgtctacaaacaaatacacgatctttgggtgtctcacagcaaagaccacaatctttaagtcctgtagcaaattttgtctaatgtgaaagacacagggaatatcaaacctggtctacaggtatccgtcggctgctcctggcccagctgcaggagcagcagccgccgccaccaaccaagctcgaaaatgctactaggcgcggccacgtagcatcgcgcggagagccggacggcagagcgacgcgtgttgatacggggtgggcagaaaaataccgatccaaaaagaccgagaccgagaccgagaaattcggtgatcaattcggtcctaggtagcgaaaaaccgaaatttgttcggtcaatttggttagtctcttcgggtaaccgaatagaccgaattatcaaaaaaaattgtcaaaatacaacctacaatccactatgtctaataggattaaactttaattttcacatccctacttcttctaggcatttaacctaataagagtctttacttataagtgcttacgaattttttttttatgatttttgtgttgaaaatttccattatttctttgcatatatgaaaatgttgttgaatttcggtcaggaccgagaccgaatttgtcggtcctgatattttttcgcggaaattcggtcttcacttttcaaagatcgaaaagaccgaaagaccgaaaccgagatcgaaattttcggttagactgaatgcccacccctacgtgttgagacttgtgagaggactggcgcggttttttttcgggtttccctcgttttttttctggtttttccgatatttctgcacgtatataaagtttgtatacgtattggtttttccatttttaatacgtatgaatatataaagtttatatatgcatgtacacaaaatttgtatatacatatatagaaactttgtatatgtatatagtaaaattttgttagtatacgtataaaataattatataaatatatatcatacatatacatatgtgtatatatacgtatgtactgtatattgtattgatgggttagatgggggcggaccgacaacgcggctggccggctgccggctgcagccccgcgcgcaaccgatcagccacccccaacaagctgggctccagtttggcgagtcaacgagcgaaatcaagtagtagacgagcaacagtggacgccagcaaataaaccttcacaatgtaccgtccaaatctcaaagccccgaacgttcgacgagcttcgggaaagctctatcgggcccttcatgtacaatgtaccgtccgaatctcaaagctccgaacgttcgacgagcttcgggaaagaacgaatcgttcgcaccggttataaatagtgtgctgcgaacgttcactctcacaaccagtcaaccacaaccatccgttcgattgatcgatccttccaaaccctagcttagtcgttgactcctgcgccgtccggtgagccagccatgtctcccgtacgcttcaacccgtggcgtgcggcggaggcggaggtgcaaggtgtgaagaggaaaggtgactcctgctacaacaaggggagctacgggaaggccatcaagcactacacccgcggcgccgaactcgaccccagcgacatctccttcttgatcaagcgagccaaagccctatcgggcctgggacaggtcagactcctttttctttccggcctgattgaacaagacaagggaaagggtaggggagttgtttagacggtgggattagtcgacggacttactagtaacatcttttagttcccatcccttgtttggtttaagatggagattaccccgggatttgggggagatttggcacaaaatgggcatctctggaacgtgaatcgagtggcacattctgaaacgagtgtgaattgagtagcatataatgaaatttcttccaaattgatgttcctcgcggatttaattttttttttcgagggaaccctcgcggacttgattaacgccctgttcgtttcagtaccaggagtgcgtgagggactgcaacgacgcgctgaggaggggcgaggagctcggctccggcagctccggcaacaagctgatctcggaggcgctgttgtggaaggcgtcggcgctggagcatctcgccgactgcgccgcggattacgagcaggtgatcctgctgctgcggcggtcgctggaaacgtgccacagcgaggaggcgcagattaggctgaagggggcgttgttcatgagggagcagtacgaggaactcaaaagtatggactttcatttcctctgctttatcagtatacgaagccagttgattactgtgcacattgatcgattttccttgtattttcaagatatattcctccctgacatatggtcattgaatgatctactacctccgacccataaaaaaaagaccagtactgaatgtaatatatcatagtactacgaaaatctctgtctagatttagatttattatgctagaatatgtcatatctaattatatatttgttttttttgagacggagggagtagataccactttacccaagttttactttaaaccatctttagcacatacagtagtattatttcacatcctttgagaactccgcaacaaatgttgtggttgttatagtggaagtgcagaacgcaaagtaaattgtatagctcatggggcttgcaatgccagtgtagttgtaccaatatgccctttctttaagcatgagtatatatgggtgtgtttagttcacgttaaaattggaagtttggttgaaatttgaacgatgtgacgagaaagttggaagtttgtgtgtgtagaaaagttttaatgtgatggaaaagttggaagtttaaataaatagtttagaactaaacaaggccatagtagcaagttcctgagccctacctagtactactaaagttctaaattggaattgcattaaattgtaatttatagtcattcttcctgtaacatctctaataattagaagttgtagcttctttaaagcagagttcggaatgaatttcgttattaaaaaaaagtcccattaagatgtacaaatgttacaggccaaaaacttgaatgtggtgcttatccaacttacacgcagcatctttaccccgcaaggtacctttccagtcatctgttatccttataaattttgctattattattggaactaacattttgtccggtttagacttgaagagcgcattaacatggataaaaccaggctcaacaccttgttgaaggtattctacccatttactttctttcttttaacagggatgtattgcttgtgtggttatctctaatgttgtaaaaatcagccaaagtggccacaaattcgggtaataccaatatagctcctcacaacttggaagatacaatctgtaccttcttatggaggaggtaccgaaactaattctacaagaggaaataggattgaagatttttgactctcattggtatttaagggttagttaacagataatggaaaaaacatatatacctcccgagtcccgatatctctcccaaccaaaaaaaaaacaaaccttatattgccgactatacaccttcccaaggttggaagcagtgggccaaaacggccttaggctattacgcattcttttctctttcattttaactcatttcgcatagcacatatatttttcctttttgagcacttctaatatggtggaatattatttatttttatcagcaagctaatggatgcctatttttagcatgcaacaaaagaactacaaaaaaatgaggacaaattatccgaggagcgctcaagacggaaggaatacgaagacatggtaaaaaccattaccgatttgctaaatgtcactgcattgaacatttatttttgcaaaagtttagcttgaccagaagcgtaacatcatgtcatcaatcatcctcaattgtttcttattgtgaaaaagtttgattctatagtgtataacagcattcactgctgctattccaagatatggacgagcttggagcagatcattcccatatcagaatacttttcgattacatttttttttccaaaaattgaaaactgtaggatgcagcgcgccattgagtacacctatcaataatcccgatgtatgtctgaatgatatgaatgtgtttggtttgtgcaggtcatggcaattcaagcctcgattgaacaacttacaatgaatcacgatgcagaacttaagtcagtccgggaggataaagcgaatctagaatgtcaactcttacaatgcacagagaaacttgaacggctacaatccatcttaaaccgcgaaccgccattcacctgtcctatatttctggtgagcagaaaatgatcattattttttccttttccagttcatcttattttttatatacaattttctgaaactattgactattgtacaaattgtttttttttccttcaggggattttcacccattcttgtcatccaaacaatcataaaaaatgatgagttaatatgaggagatggcaccttcacaaatgtgctggtttaaattcaacctatatcacttgaagccaaaacactatttatagtcatatttattatttttttcaactggccttgaatttaagcttaaatgtttgtgaatcaatgttacataatattctttcttgccaaaatttttaataacttttagatgtcatgcaaaacaaaatctttcctgactacacttattaccttgcttggtcaaaatttcagcatgtcatggaggatccttacattacagcggatggacacacctacgacggtgaggcgatcagggcatggctcgacgctgggcatgacacatctccagttaccaacttgcctcttgaacacatggaactcattcccaatcgcgcactccgttctgctattgtgtggtggcacgaacagcagaacgcggcacgcgaacaccgcgacatggcgtgaactacaactcggcgtttcatattgtaaaattcttaattgttgtctgtacttttgaacaattttttgctgtctgtagttacttgttagccatgtttataacacacaggttgaaattgtaggctgttagtatgccttgtacacacaggtcgatataattcatgccagaatgcaacataaacacagcattcagtaaaacagctcttaatcatatgactgtgaaacagtaccaaatatttcacaaaagcaggtgaaacaaatagcaagatttgaacatcagaaagatttcccatttataatcagagcaacaattgacagcaacagcaacaagccattacatcactactactaagcaattctggtactagagctatcacagatgaagcgactaataaattaatcaggcgcgctcaccgcggatgcggcgggcgagctggatgtccttgggcatgatggtgacgcgcttggcgtggatggcgcacaggttagtgtcctcgaagagcccgacgaggtacgcctccgcggcctcctgcagcgcggcgacggcggagctctggaagcggaggtcggtcttgaagtcctgggcgatctcgcggacgaggcgctggaaggggagcttgcggatgagcagctccgtgctcttctggtacttgcggatctcacggagcgcgacggtgcccggcctgaagcggtgcggcttcttcacgccgccggtggccggcgccgacttgcgcgccgccttggtcgccagctgcttcctcggcgccttcccgccggtggacttgcgcgccgtctgcttcgtgcgggccatcgaggaggagaggagaggagagcttgacgcggcggagctttggatttgagaaatttcgcggcgaagtcggcggcggcggagtgggttgagacagcgagggaggcgacgcgtttatatagggggaggctggggtttggaatttgagagcgcgaaaattttttgggtttggattttggccgcggggaatcagcgccgttggattgcgtgcgaatggacggtgcagattggatccagggggcatcacacggatcgcgatccgtggggggtcgagttctgcgctgtgattggttggagcagctgcgcgcggatcgcgttcgcatcccgcgcggggccgcgcctcccccaaattccaaacccccaaaatttcgcccaaatttcgaacattttcactgcgcgcgtactatgcgaatgcgaatccctcccaaatttcacgcctatttaaacaccgccgaatcccaccgcctcaatccaccaccgccaagtttcaaatccaaagaactcactcgccgccgcctccgccgcgccaagctctcctctcctccttctcgatggcccgcacgaagcagacggcgcgcaagtccaccggcgggaaggcgccgaggaaacagctggcgaccaaggcggcgcgcaagtcggcgccggccaccggcggcgtgaagaagccgcaccgcttcaggccgggcaccgtcgcgctccgtgagatccgcaagtaccagaagagcacggagctgctcatccgcaagctccccttccagcgcctcgtccgcgagatcgcccaggacttcaagaccgacctccgcttccagagctccgccgtcgccgccctgcaggaggccgcggaggcgtacctcgtcgggctgttcgaggacaccaacctgtgcgccatccacgccaagcgcgtcaccatcatgcccaaggacatccagctcgcgcgccggatccgcggcgagcgcgcttaggccatcagcccacctttggttcttgcttgattcatagggacttgtcatgttctaccagttggtgttattattagatcgtcgctttgtcatgtcgtagtcttagattcttagtttccatggttgcaatgtaactgctggttattctgaaattgcaatcgaagtaatctgttttatccccaaatttctgtgtccatcttgatcctgtgaacagattgcctttgactggatgatgtgatgttcagaatgtttctgaagttattctgatgatctgaactgaatatttcggttatcctagtacttgtcctgttctgtttgatattcagaaatcaaaatggttctgaagttttccgattgctggtatggatttgcagcatttgtccccaagattggaagtagtagtgtttttctcaaaaggaaaagcattgaaaagaattgcagttcaagtctctgttatattcatacataaaggcaagtactctatacttctgtagtctgtttcataatgctcaaaatctgcaattcaagtctcggtaccgtagtactgtgtattagtaggatatacaataaacatgattttattcttagttgaaggtttgaatatcaaacctctttatgtactactgactactgagactttcatactatttacaacatctcttttccagaagatgtgctttcctgtcatattctggtttcagcaactaagtatgactagattggtgctgtgattatgctatgggctgtaggtggcaaagtttggaaagatcaaaaggtggatatgaatatgagccgctcatcaaggaagatgctatgatcttgtttgcagcttctgtcgcatggattccatcccagctcacgtagttctgtggatcagcacaagcttttgcggttaccgtttggccattcagcaatttgctgcttccacagtacacatctgggttgaaattgtaagccccatcaccatatccgcagcaagccttagtcccatacttcagccctgaaaccatggtcaatcagatcagtatcacaacaattgctgacaataagcaagattgattcatgtaatacttgaaactgcataatgtaccactactagagagcatataccatgagctttaggatggcgaaacagctcgagcgtcacagcgtgtttgtcaagatacacaatagatgcatcctgcagcttcttcctaacctcggccaagctattgttcagcagttcattgtagtaggtcactgcactgttgtaggttttcatgcaaccatatccatccatgtcattgctggtatgcgggagtttcgtgaggaatgccgggtagcatccgataggcgccatgttaaacaccataatgttgcgagcgccaatgttgtacaattcctgcgaagaatcgaataggtgagtatggaatatgcagttaattattaatctccaatctcttatctttctcaagttcagctaaattctaatttgcactatttacctgcacagtagaggagatcttgctaacaactgaagggagactttgcttgaccgtctcaatgctctgtgatcccaggttggaggtgagatcattttgaccaatgtcaattgtgtacagagcattgtgcagaacatcaggtgcaggaagttggtctgaaaattaatcttaactagattagcaatactatctctgtcagtagcagataagattgttactacttgaaacaaaaccatcactgttcagatcaattatcctaaatattctcttcagaaattcagcagaatctctgcactgacgcagggcatgactgaactgtctgaaatctgaacaggataccatcactgttggcgttgggcgagcataccgttgttgccattggaggtgagcaccttggtcctcagctccttcatctggttgagctggacagcgaggaagaaggggctgatgccggtgacgaacagcgaggtgttgggctgcagcgccgtggacgccagcgtcgcgaagttggcgccgtggcggtagccggagccgacggactgcaggtaagggctcagcagcggaagccccatcgcttgcactgagacgaacacaccaccatttccttattcagatgagcaatccatggcgcggcgagcagaggaaggagaaggaatgaagaagacgtgcttgcctaggaagtcgacgacgaggcggccgtcggaggcgcggccggcggggcggcggaaataggtcataccgaacggcgcctgctgcgccgggaaggcggcccagaagccgccggtgtcggagttggagtcgccgaagttgaagacggccgggaacctgcactgcgccgtcgcactcgccgccgcgacgaggcagcacagcgccgcagccgccgtcgcgagccacgtgatcctcctcatggcggagagagagagaagagcagatagctcgtaagcttcgatcggcgataggcgggagacggcgcgacatgccgtcgttttatagcgggagagaggaaggagatgggagatcgtggtgttgggctggaaatgtaattttcttttttcttttcttttcttttttccctttttctgagagaaattgagacggcattgcaacgattttgttttcttttaatgagagaaattgagacagcattgcaacgatttcgttatgggggagagaaggagatggggatggattgtggtgtttgttcttgttcatgctcgttgttgctgtccagtgatgcaaagctcatcctcagcagaaaaaagatagcgtggtgaacagtgatcctcgattctagatcaaacgataagttcttcaatgacatttaggccttagtgtgtggatggaacagtcaccggccgacacatattctggacttgtctgcagcaccacagtacatatgcttgtttcatacggagtatgcccaaaccagtgctttaggcatgcaaaaaggtgcactacctccgtccaaaaataagtgtagtcatgagttttcgcactcaattttgatcattcgtcttatttgaattttttttataattagcatttttgttgttctgagatgataaaatatgaacagtattttacttatgacttatgttttaaattatttttaaaaaaaatttaaataagatgaacggttaaagttgggcgtggaaaactatggctgcatttattttgggactgaggtagtaattgttagcgtgtttacttaccatctggaagttgttcgtcacgttattgaacgagtgattttgccaccatgtcaagtgacaaccaaccgtcatccacggacatgaactatccagtagtgagctccagccagcaaattgccacaggaatctggctgctgctgtgcagcacacagcgttcggagcttactgaacaacggcgggaagaaattgctgaatcgaccaaaaaggagtagcaaacgtatagcaaccaaagtttcagcaatcagaatcatcacctactggctctatatatccgacacaaaaagcaaggttaagtttatgaaaccgcttgggaagcacaacaatagtcagttcatgaaactcgtagcggaaatacgcgtacaatagctagcactcgaaaccatcattaaaaacgcgacatgtatggcgcttgccagcgtaagatggacctatacatgggggaatatgtggagagttttgttctggactatgatgtgccgatcaggtgctggataactttgtcagggtcgttgtcgtggatggccagcagttcgggaacatttgaggatgtgaagcccatctcgtggagagcgttgtaggatttcacaaactccttcacctgcaagtacataggattcatccttgtcagtttctctctcttttttttccactgtctacaaatgctcgtggcgattagaatggcagaagacacttctatctccctgagaagtagaaaatcgaattccacaaaaactaccaactggacagaatggcaatcactgttttgctagaagaagaaaccctagtgcttctgcaaatactgattgtatatagctatcttgttgacctttgaaaacctttttgagttatcaaagcaatggtttttgttcttgatgatatgttgaaagaaggtaatgataaatcacaagataaataagggaaaaagcatgccttcgctggattatctccatagttcaacacagcaaatgagacagcttcacgtccaagccccatggatatatacttgtccacaactggatcccctggagtagcctgcagaagggcaaaaataaaaataagttttctagggagatggcattacatctctacaacttcctagggtacctaacttgttataaacagctgatattgctatcatgtgaaaggatgccaagaagcgaaaaatctcttgagtatcaggggtattagtccccatttgcccaaggaactttatatattagcccttgcaatggattatcgatttttcaacaacagcctgctccctgatgttaagtacctagcactatttgtgtaatacacaatactatatggaagacaagaattatgtagatattattaccacagaagtagtgggagttgtgagttttgggcctcttggcggctgtggtggtggtggtggctgactctctatcacaaacttgctccagttggggttctccttctcagcctcagcaagaattttcctttcatactcaaaatcaaaattgaaggtactgcgaggaatttctgtaagctgtggcggcaactgaggctgcaataataaaagcaaagcacacattagaggatggccaatgatcaaatatacgagggaagtgtagataataaacgttgatgcatttaacaaagaaggatgcataaatatgcaaaatagatggaagtttgcaagatgatgccatttgtctctagaaagaacagctaggcaagcgcagtacatggaacaagttttgagggagcccattatagtatgaatcatgtctgcaagctaccaactagaacaccatattcacagtaaaagaatggaatggccaataaatgaataaataaataaaggaaaagaacaaacagaatccatccacaaagtctactatacggaataaactgcactatctatatcttctacgatgggcttctaacaacataatagtccatcaagaaacaactagaccattaagatttgtgagcgttcagaacataatagccccatgcagattgaataactagaggtgaatcctgagctaatgctactagaagtccattatttgtgaatatttgtagtggagctatttcctcatctctaattttacgcacagaagcacaaaccaatatacagagagacagtttataaacaaccatatctcctgttacactgcaacataatatcttcgttccttttcaaaagccaaaggaggataatttcagcagttcaaaactatcatgacgctatgatttatgtctgctttcaatacacaaaagttagaaggcatcaatttgaatctgaaagaacagtgtttggctgtttgctaaataaacaccaagttactccaattgaattaccaatcttaactaaacataaagggaatttataccaaacatcctgcaggcattaaaatagaaaatttggtaccaaagcagatgaacaattctcatgtaggtgaatacagcaaagtgatgactgaataacaaacttagtgacttacaggaggggttatccgatatgctggctttatcacaacttgtatgcccactgcagcaacaacaattaatgatgaataacatgctcttgataattggcaaaaaaggaaacgctacagggcagtttctaaatctggcatgatatcaacagtaaaaacagggatgttccaatatttttgtcttcaaataacttttgggaaaaaaattatatcgatgggcccagggaattctacaattttaccaacttcggctatgttgaaaacaccattaaaacaaacacttcaatgttttcactcccacagtcaatgtttcattagcaaaggtgcagaaagaaccctatgctgttgcatttatttgtctttggctagtgaaaaaacgcacacatgcaaaagccagattttctcgcacactttaaaatatagaaagtacagcattttcaactaaacaaagctgttacttttgagaactcaattttgtacataacgagaccatgtttaggcctatactgaggtcaactagaacatataaacagtagtagagctcgttcccttatccaaagacaaggtttaatctaattctgttgttgttgctgatacaagtgcccggtacgtcccctttttcattgctagctaggaagcatagcatggtgaactaactaatcacaccgatgtgcaaatgattaaatcgaggcaatttactgcatgaacaagcttggtaggtctgacaagccacctagaaaccaaatggtagtagaagttcaatgcacaactcaaaaccaaactagctcagtttcagggataaatcgctcgggatcacgatacccctccaaccggattacaacatgagatctgccaatctagcacgcaatccaatcaggtagaataagctgttcacaattcgatcgagtaaacatgacacgcagttctctcttctgcgctacccagcgattcactatgcagagattcagtatgcacagagcggggagggagggatttactcgatgtggaggacgaggcggggacggggtgcggagccgcggagacggtgggggggccatggtggtggtacggcgcggcccgcggcggctccggcgggggcgcgttggcgacgccgtgggagggctggccgacgcgcgggtagagggacgacgaccccccgccgccgccgacgccgccgccgtaggatccggagcccggcctgccccggtagtcgtagtccatcctcgccgcgcgcgcgcgcgcccgcgccggtggggctgagctcctcgggtgagagctgacgcgcctcgccgccggtggatcgcttcgccgggaaggatggaggaggacgcggttgcgggtgggggagaattggagcggagaggtggacggagtcgccatggtcggggaaggaagaaggcaacgtgatgggccggatcacgaggcgggctgggctggggttgtgctcgcgtggacgccgcttcggcccgcatcgaccgggctttgcggtgggtgggtctcggcctgcctgtgcgtcgagggtgggccatgtagggagggtgggccgcgtgatccgaagttgacgaccacggtaggaataagttcagtttaactccctcagatatatctccaatctaattcatatatctaaaccgctactggatatcttgaatcaacaaactattagaattggtgtaatttgactccttcaaggtttaggagggtcgctaatgtggcactttgatttggtctaaccttttgagtcatcctatgggacccaaccatcagtaacccttatatttcttctcttcctttccttttcccttcgtcggatcggcgccgccccctcttcccccttctgctctgcgctggaccgccattagagatttttatgggttttagggtgctgttgtagcacgaaggggcaaattttaattcttttgccacttgtcgtcgtggagggggttgtctgtaaatatgttgcctacgtggaatgccacgtcagcggttagctccagtcaagtgaggtttggactggctacgaatcattaaaccaagatgacagatctatatgtgtaatttttaagtttacggacctaagtgacagctactttcaagtttaaagacagtcatgtattttacttaaaaaaaatagcacttattcaattgctccaatgtcatgatatgtgagcaaatgggtgcttgcatttacggttaattatttttttattgataggtgatatacatgtcggcagcaaagacgttcgtagtgatttcatcatcttcaaaatatatcggtcaagtttttataaggtacttacagtatacgcgcgttatgaacgtccgtatttgtattcgtatagtgtgtttctaaaataatagtaagagtggaaacataatcgaacagaccaagtggcgaattaatcatgtctatcctatcaatggatgcatgcatgcactcttccgttaaattagcgtgcaactggcgatggcgatggcgaccgagtctggccagtctagttaatttctctctctactatactcaacttatacagatgcttacaaataatgcaattatgtatcaggtggagtggcaacggcgctcgatcgatggccttcgattcccatttctatggctggcgtttttgtccgttgcgttggctgcagcgcaggggatcggcatgggtcgtccggccaccgtaccggccgggctaccggctcgtttcgccccgcgcgcggctcgatcggcatctctggatcgttgcatgtcaccgtgcgcgcgctggcgttttgcgttgtccggtcaggcgcgctaggcctagctatatatcgatcgcgcatgcaggcttcagattgcccgggtttcactccctttctctcccagatacgcagatagttagatcacagttgttacatactcccctacatgagggtggcggatctgtcatgggggcgatagagcctcgagtactcactaccgatgttacaaccatgagagttttcattaagtttccactaaaaatttttatcatacatatattagattattagaataatgagttatagttttttataacttgttcagccctttctatgagttcttcttggatgcaagcctttgcagttttcatcccataaaaaaaaatctaagtagggagtgtagttcgagatgtgataatcttattactaggatgcatcacatctagtttgtttttattaccatccatattagtagtattgtgattgtcatatcctgtactagatttattttttataggatgaaataagtagatggagtagatcgtttggaacgttcctgtttaattgattcagttatagctaataagacatagaaatataaataaatgaccatacaaatagtttgtaggtaaacttgcatgcatgtttcattaatttgtagttatggttaaaaaaaactcatgtcggaaaatacaccacttatacggtaaaagatatctcgcaatcaactctatatttgaatttcaaattttaatttttggctctgttacgttactaacatgtttacgatttctagttttttgtaaaaaaaaaaactgtgcgaaatttattcgttcatcttttttccatgaagtgtgtcggctctatatctcgatacaagttgaaagcaaaatgccaacagttttcttctgttttatttctttaaagagatgccaaaaagtagatatttggcgtataccttctgttcccaagcgtatctaaactaaaacatgatgcgtttaatttgtccgtgctccttcaaacatgtcgctgtacgttggcgattttggcacgttgcgtttgagaggggaaaaagaaacaaatttgggcgtccattaggcggctaatcattctgctgcttttgtgattatgtcaatagacatacatatatagggagtgattgattggtttgctcgtcctgttatgtcttgatctcgtcatagcgaagaactctgctgattccttttagacctttggccggccattattagattaatttctcacatcaattaatcgtgtgtgttaattttatgctgaatggctaaatagataaataatttatactaataactattgagagcacaagcatgtgaattaactattataaagttgtaaatgtatttaaatcaatattataggaaattcaaaattcatatataaaaacccgttcaaaaatcgtttagaagcttcttgcatgttcatccgttttcacgtttcacagttttcacatcattaccttctctttcttcaagtcttatgaagctgctatatagagttatatataaggcaagtttgcatagctctgatctaaatccaatatatttagaactagatattcatagctccagaaatacatttttatggatatgtcattaaattgataatgtttgaaaaaaaccattttattcctatttcagattaaattccttaaaaaatataaaaaacaaaatattgtaacttaacttacaaactctacatcagcgtgatctaaagctgtgacaaacaaaatatctaacttgttttcggaatcaatttgttcttcaaacctctattcagggtcaatatagcagaagaaaagggtagattcttttatgattaggagtggttgaggagcgcgccgtttttacggatttgcttataaactgatgatttaacagctgtaaaatgtactcaactgttgcatggtcaaccgcgcgagcgagactgcgcacgtgacgtccgcatgggcccacacgtcggtgagtcatttgccgagaggcggtgtcgcgtggcgggagtgcgatcagctgtgccgcttacacgtggccgaagagattaaagatgagcactttgtttttttctaaaaaaaaggttaaagaatatttactgatccaaacaaccaattaaaataagggaatttaactatttgacacttttaagatggataattaagaatctgtcacccgcaatatataacatgcggaccaatatgtgagtccttaattatcacttgtaaaattgacaaaaagttaaatatctctacaatgcaatatatgacatgcggaccaatatgtgagtccttaattatccttgataaaaagttaaatatctcaaaaatagaacccaaacaatgggtgaaagaagatctaaaggatagatggtatcaagtcaaaatgagagggagacaacagtctatatacgtacatatgtaacaaatcatgagtgattaggaggttgaagattttgcaaggatccagatactataaaaattcctccttgcaattcttgagccttaagaatctcttcgtatagcttcgttctctctccctcccttttctctcgcactgcaactactaccgtatcgattgatcagtctcctctccttcatctccattaatttgcttgcaactactaccgtatcgatcgatcagtctccacctctccttcatctccattaatttgcttgttgagagcttgagatcaagcccaatggtggaagttatcgtggagaagaaggcgcgaaggattgtgagggggaggtggcatgtggaggcgagcaacgaagcggcggcggcggcgccggctgttgccgcgcccgcgcccagggttgttcgggttctctgcagagaccacgacgccacggactcctccggcgacgacgatggcgaggacgacgcgccgcggcgtgctcgcctcctcgtgcacgagatccacgtcgcgcggcagccggtggccatgtcgccagcggcggcgagctccagccagagacgtcgtgtcggcccgatgaagaggacggaatcggcggtggatgcgacgatggacgcgacggcggcggcgccggagaggaagttccgcggggtgaggaagcggccgtgggggaagtacggggcggagatccgcgtgtcgcagcagagcgcgcgcgtgtggctcggcacgttcgacaccgccgaggaggccgcgcgggtgtacgaccacgccgccctccgcctgcgcgggccgtccgccacgaccaacttccccatgacgccagcggcgccgtcgcctcctccctcgcgcgccacctacgccggcgcggcgtccgggtacgacgagtccagcgacgagtcgcagctcgtcggctcgccggtctccgtgctccgcccaatgccggcgcgcgcaacggccaagaaagaggccaaggaagaagacgactccgcccccgatatcctcggcatctccgccggcgacggcttaatctccccgttcacctgcgacgtcctgaatttcccaccgcccgacgaggacatgttcggcggcggcatctccttcggcgagccgacaccgccacccatggtgttcgacgacgactgcatggcgcgcctcggccacgcccccaacgacgacgagcacccggtgacgagctcgtccttcctcgacggcgatctcggcgacctgccgtcgtggacggaggtggacggcttcttcagcgacgtcggcggcgacgacctgttcgccgccgagccgttcccggcgctctgagactgacagttttgtcgcgagctttgtctacgtacgtacgtgtgcttgtgtagtgtgtgtttaattaattcgtttattattagcgattgcaaatatttcttgtgtcaccgtgagatcaccggagatcgccgagggaatacaaatatttcttgcaaatatatatcaccggagatcgccgggggaaatgcaaatatttcttgcaaatatatatcaccggagatcgccgggaatgcaaatatctctttgcaaatatatagcggcggagatcgctggcaatgccaccggtgacggcagcaaaccggcgtaatatagaagacgcgccggcgtaatatagaagacgctgccgatattatctaaccttcggatcccatgcataaaaagtgcatctggcgggttcggagataaaaatatccgactccttttgggcttttttcctttttatgttttctttttctatggttggaccatgtttcccgcttggttctccgtgcccagtgtagctaacgggccgatgtaattgtgccgtccaatgattttagacccaacgtgcaccgtgcgaaatagaataagttcactttggatctctgatcttgacaccaaattccacttggtgctatcagtctgtttctacagtggcaccgactaggacaagaaattgggctagattaaaagcccataatttacacggacacgaaagttttggcccatgttgatgaataaggtggaatcgaaccctttcgaattatttttcatagttttcaaattaggaggattcggagattaaaacatcggccctcttcattatttttttctaccttttgccatcatggcctgataactttgggacaactttggttaatcgactcgaatattacggacgcaacaatcgttttaatatatcagcaggcttatacttgaaaaaaatcagcaattgcaagcacatacgtaattaagctcgtattaattggcttgtaatttacaaattttcccttgttttcctcaagttttgcccttttttgctgtcatcgtaatttacaagtattacgccttgcaaatgcacatgaacgaatgaatgggtcgacgaattttacaagttattaattgatgattgttgtttgattaaattcaccacgcttcttcctagtggcgacaatagcggcgacggaggctgtgacgaccgacgacgcgacgatgatggcagtgtttagtgtgtagtgtgtgtttgatttattcatttattattagcgattgcaaatattcttgtgtcaccgtgagatcgctgggggaaagcaaatagttcttgcaaatgtatatcatcggagatcgccgggaatgcaaatatatatcgccaggggaatgcaaatatttcttgcaaatatatagcggcagagatcgccggcaatgccgccgatgattgcggcgagccggcgtaatagagcagtatcttatctcagacgccgccgacattatcgcgtgaagacatggaagtatcgagcagttagatacttagatcgctggatcgcataaaaaaaacatctgcggggttcggagataaaaacttcgacccccatttggacctttttctttttcttttaatttcctttttctcatcatgttggattggcagtgcggtgattttagacccagtgtgcaacgtccaaaatccacttggtgctattaggccgtatccatagtggaaccaaccaagcctagaaattgggctagattaaaagcccatagtttacacagacacggaagttttggcccatgttgatgactaaggtggaatcgaaccctttcgaattatttttcttggttttcaaattaggagggttcggagattaaaacatcgatgctcttcagtatttttttctaccttttgccatcacggcctaataactttgggacaactttggttaatcggctcgaatattacggacgcaacaatcgttttaatatattagcaggcttatacttgaaaaaaaatcagcaattgcaagcacatacgtaattaagctcgtattaattggcatgtaatttacaaattttcccttgttttcctcaagttttgcccctttttttgcggtcatcgtaatttaaaagtattacgccttacaaatgcacatgaacgaatgaatgggtcgacgaattttgcaagttattaattgatgattgttgtttgattaaattcaccacgcttcttcgtagtggccacaatggcggcgacggaggctgtgacgaccgacgacgcgacgatgatggtagtgtgtagtgtgtgtttgatttattcgtttattattagcgattgcaaatatttcttgtgtcaccgtgagatcgttgggggagtgcaaatatttcttgcaaatgtatatcaccggagatcgccgggaatggaaatatatatcgccggaggaatgcaaatatttcttgcaaatatatagcggcagagatcgccggcaatgccgccgatgattgcggcgagccagcgtaatatagcagtatcttatctcagacgccgtcgacattatcgcgtgaagacatggatgtatcgagcagttagatacttagatcgccggatcacatgcaaaaaaaaaagcatctgcggggttcggagataaaaacttcgaccccccatttggacctttttccttttcttttaatttcgtttttctcatcaggttggatcggcagtgcggtgattttagtcccagtgtgcaacatccaaaatccactcggtgctatcaggccatatccatagtggaaccgaccaagcctagaaattgggctagattaaaagcccatagtttacacggacacggaagttttggcccatattgatgactaaggtggaatcgaaccctttcgaattatttttcttggttttcaaattaggagggtttggagattaaaacatcgaccctcttcagtatattttttctacctttttccataacggcctaataactctgggacaactttggttaatcggctcgaatattatggacgcaacaatcgttttaatatatcagcaagcttatacttgaaaaaaatcggcaattgcaagcacatacgtaattaagctcgtattaattggcttgtaatttacaatttttcccttgttttcctcattttttcccttttttgcggtcatcgtaatttacaagtattacgccaaatgcacatgaatgaatgaatgggtcgacgaattttacaagttattaattgatgattgttgtttgattaaatttttcacgtttcttcctagtggcgacaatggcggcgacggaggttgtgacgacggacgacatgacgatgatggcagtgtgtagtgtgtgtttgatttattcgtttattattagcgattgcaaatatttcttgagttaccgtgagatcgctgggggaatgcaaatatttcttgcaaatgtatatcaccggagattgccgggaatgcaaatatatatcgccgggggaatgcaaatatttcttgcaaatatataacggcagagatcgtcggcaatgccgccgatgattgcggcgagccggcgtaatatagtagtatcttatctcagacgtcaccgacactatcgtgtaaagacatggaagtatcgagcagttagatacttagatcgtcggatctcatgcaaaaaaaagcatctgcggggttcggagataaaaactccgacccccgtttggacccctttttttcttttaatttcctttttctcattaggttggatcggcagtgcggtgattttagtcccagtgtgcaacgtccaaaatccactcggtgctatcaggccgtatccatagtggaaccgaccaagcctagaaattgggctagattaaaatcccatagtttacgcggacacgaaagttttggcccatgttgatgactaaggtggaatcaaaccctttcgaattatttttcttggttttcaaattaggatggttcggatattaaaacgtcgaccctctttagtatttttttctacctttagccatcacggtctaataactttgggacaactttggttaatcggctcgaatattatggacgcaacaatcattttaatatatatgcaggcttatacttgaaatgaaaatcaacaactgcaagcacatacgtagttaagctcgtattaactggcttgtaatttacaaattttcccttgttttcctcaagttttgccttcttttggagaataaaatggaattttaggtcatcgtaatttacaactattacgccttacaaaggcaaatgaacgaataaatggatccacagattttacaaggtattaattgatgattgatgtttgattaaattcacccacgcttcttcctggtgtcgacaatgatgacgatgatggcggcgacgaccgacgacgatggtggtgtgtagtgtgtgtttgattaatttgtttattatttgcgattgcaaatatttcttgtgtcaccgtgagatcactgggggaatgcaaatagttcttgcaaatatatatcaccagagatcgtcgggactgcaaatatttcttccaaatatatatagctggagttcgccgatggaatgcaaatatttcttgcaaatatatagtggcggagatcgctggcaattccgctgataatggcggcgagccggcataatatagcagtatcttatctcagacgccgccgacattatcgtgcgaaggcgtggaactatcgagcagttagatcaccgaatcgcgtgcaaaaaaaatgcatctatggaatctccgaacccccatttgaacctttttctttttcttttagtttccttttctcatcaggttggatcgaacgtgaggtgattttagacccagcagtgtgcaacgtccaaaatccactcggtgctatcaggccgtatccacagtggaaccgaccaggcctagaaattaggctagattaaaagcctataatttacgcggacacggaagttttggcccatgttaatgagtaaggtggaatcgaacccttttgaattatttttcttggttttgaaattaggagggtttggagattatggggctgtttggatgctatactaagtttgtcaccattcaccatacatttataccacacttgcctaagttgtggctttaaaaaagaaatccacactttgttgagttgatgacgtgtagggtcataatatatgagaaggagttttgccacaagtatggctatgaaccaaataatagactaactttgtcaaacttgcctaatataaagtgtggcaacctatggcaaactttgggagcaaaccaaacaacccctaaaacaccgaccctcttcagtattttttttctaccttttggcatcacgtcttaataactttgggacaactttggttaatcggctcgaatattatggacgcaacaatcgttgtaatacatcagtaggcttatactttaaaaaacagcaactgcaagcacataggtaattaagctagtattaattggcttgtaatttacaaattttcccttgtttttctcaagttttgcctttttttgcgggagaataaatggtattttaggtcattataatttacaagtattacgccttacaatggcagatgaacgaatggatggatccaggaattttacaagttattaatagatttgttgtttgattaaattcacccacgcttcttcctggtggcgacaatggcgacgacggaggcggcgacgaccgacgaggcggcgacgatggcggggcggtagcggacgaagaagttgttcatccgcttctcgtggaacaccttcaccttctcgacctgcacgtccatggccatgaacaccgacgggtaggtggcgtacccgtcgatcttcttgatgagctcgtgcacctcgccggcgcccctggacccgccgcgcacgacgccggcgcggcggaggatcctcacgtcggcgacctcctcgacgagctcgttcatcagttggaagtagcgggtcaccggcttgctctgctcctccagctcccgcgccaggaggttcctcgccaccgtggccagcttgaagtcgaacaccagcgccggcagccgcagcgtcgcggcgtcctccttgaactggaccacggcgcggccgtcctccacgccggcctcgagacggacgcccgagcggcggagctccttcgccgtcgggatcctcgacgtcttgccgcctttcacccctcccgcgccgccgccggcttccgacgacggcggaacaaggctggcgtgcaggcagtccaggagcgtgagctcgccggagatggcggcgtcgtcgggtttcttggcctgttcgtccttggagaagaacggcgagtagtacgagcagaacgagcggatcacgccgtcgaaattcgcgcgcgcgaatccgagcttgtattcccggagcgccttcgcgacgtcgtccttgagccccgggatgtcgccggcggcggcgtggaccgccgcctcggcgaggtcggccacggcgagcaggtgcttgatcgggagctggttctcgagcttgatcacgtccgtgacgatgtcctgcatgtgcgtcgccttgaagctctcgtcgacggcgtcacgcctggcggcggccgcggcggcgcccttgccgccgccagtcgccgccgccttggtgagccgcgggaggaagccgacgacgaggaagatggcgtcgatgacctgcttgttctcctccgtgccttcgtcgggatgctgcgtcctcttcgccagctgatcatcctccgctttcttcttatcctcgtctgacacataatattcgagtaaattttgtcaaattgctccaaccaactacaacgctcttgggttcgtttgaactccattaaaacacttccttcgtttcaattacaagtcgtattattttttttctaattatcagcatttacaatactgaattagtcccattaaaactaacatttaatatgcttgttttatattgaaaatattgctataatttttataagcttgatcagaacgactttaatatataacgccgttgatttattgataaacgtttaaccatttatcttatttaattttttttgtaaatataaaaaaattatgtcatgcttaaagaacttgacgataaatcaaatcgcaattaaataaatgataattacataattttttttaataagacaaatcgtcaaatttatcttaaaaagttaacgtcagcaataaaataggagttaaagtatataagaaataagattgaatgtgatatttactacttcctcagtttcacaatgtaagttattttagcatttcccacattcatattgatgctaatgaatctagatagatatatatatatttagatttattaatatcaatatgaatgtgaaaatgctataatgacttatattgtgaaacgaaggaagtagtacggactatctatccagattcatatctaaagtagtgaaaaaactaaagtttttcatcatctcagtgcgccacatcatcaattaaatacagaccatccgatggaagaaagattcattttgaaccgttggatctggagtgtgtctgaggctcagtaaaattctattgtcgcttccatctcacgttcaagcaaagaagcacaggcttcaggaagcttcgcccatcttcctgtcactcccgtacttgccatatgtgatcagtgatcggttggttaagcagacaaggatgagtctcctctgatgtaaagtcagaggaactttgtcactgacatgtgggagtgacaaagtccctctgactttacgtcagaggagcgcgatccagcagacaaatagtctacttatatgatgtgtgttaatatgcatatgtaaaagtgtagcaagtcttcttttaagcatttttgttaagtactttctctgtcctatattaagattatttttagctcatcccatttatctcaaaataaattgatttttagtaataattatatcaaagtttataaaagtaaagaataattgcattggaagtagataaagtgataaatagttatattaggatgagataaagtagggatattttagtcttttgatgtttgtattggtatgtgtaggatgagtgaacaataaacttattttggaacatctgtattactaatatgcatttgtactaatttttttaccaggtatgcatatgtacaaattactccctttattttaaaatgtattgagatatatataaatataattaccttctcaaacaaactttccaatattatacttttaactactactgttttctttcgtttattatcaatacctacaaaatcgacgccatataaaaatagtcaaataaaaatctaacaatactactttattatataatgatataaaaatcaaataaaaagtcataacattaatcacatatccaaacctgtacttttaatccattcattagacaagtttttatgttttgatttttctcaaaataaaaatgccttatatattttagaatagacgaagaaaaaagttagtattcctttatcatacaataatactctattgtcataaatatataacgtttgttttttcttgagcaatctttcaaaattttttccatcaaggagatctcaacaacagggcaccgttggactgacctatatatacacatattttaaacgggtcttaatagccacacaacgcgtggcttatgtggctagttaatagtagaaaatgttttattcagttatatgtccttatattttgggacgacgtaagtatttaacaagcctctgaccttctgaaagggcctgcggtctacgtggtgaagggtcggggtggacgtgggggcagcagtaggcggcgaggttgaggaggaggtcgcgggagaggtgcctggtgtggtcgtcgacgtggtcgccggtgacggactcgtagacgagcgccgccttgacccagaagctgttgccgcggtcgatctcgttctcgaggccggcgtgcgagaggaggaccctcctcggcatgaactccgacgggttctctgcacgcatccgcgtgtacgccgccgaccccagcatccccgccgccgccgtccacgccgccatggctttgctcgtgcgtgcgtgctctggttcgatgggtggtggtggtggtggtgatggtgagtttgattgcgtggtggatgggagggaggagtatttatagcggtgtcgtggatgtggggggcgatgggcttgcagtaatccctttcgtgacgtggttacttaactggagggcagctgacgtgacaggggagaagaggaatgtaggagtactagccaatggctcctacagtagtactagcagcaataggcacgttgctgcattgcattccgccaacttttcttcagaacaagatgagtagtgattgatacacccccattccaaaataagcttatttatagttttttttaaccgtttaactatccgtcttatttataattatttttataattattattattattattattattagatgattaatttatttcttttaattttttgtatttttttaaataagacatacggttaaacgttgaataaagaaatccataaataaacttataacttattttatgacgaaaggtgtagtcaaagaagatcaactagagaagtaaggtaaagtattaggaaatgttttttttttcttccatgtgagcatttgtaatggactattggactgtgtcccttcctctcacaattactcatttttgttttacaaaaattgcattgaagacatttttccttcccaacttaatgtccatcattttggttcgtgtgttcgaggctttgagcaatgttctctaccttggtcccagattttaacacttctctaaatatatttttctgaaccaattataaataatgtttcatctacttccttttctcaaacaattataatatttttcattcaattttaccgttatcttgatacacgtgtctaaccccataattttataggaagaaataaatgagcagctaaaaaaacagtataaaaattagtggcgaaaaacaaaatattatcctaagatcacaaaatcccttatacattttaggacaaactaaaaaagacagaatgtcaaataccttatattgcgcgacggactgatgtacagatgtagtatttgtttctatcttgcggtcgatccgttgatggctcatgaatcatttctctctctttttcgaaggacgggaatctgggttggtcactcacaaagatgaaggattgataccttaatgagatgcctggacgtctaggtatggagcactggaggctcttctctatgccattaggccatattgcccttacagcaggttaatgagataacaaggggtaggtgatcacggcatcacgccaaggataattggataaagcaacttgatttgattacaaggggtggaaaaatgtgctgcatatgcgagtgcctgtgcctgctaacacaaggcacacctgactgatgccgcatgcttccaaacactactccctccatttcacaatataaatcattctagcattttccatagaatgacttacattgtgaaacgaaggaagtatttagtcttcaccttgtgatttccaagatctcttttgacacttgacatcgcagtagctacagcttccaaacactatttagtcttcaccttaagactcaacaatacagttacctaatggactaaaatttatcttcacacaaatataagaacagcacaggcgacaaagtattaagcaaaaaagggtacaactgtaattgatgggagctaaatcctattgattccaagactcacatttcgatgcattgagaggttgcttgcgtggtatcagccacatgtgaaaccgcttcaagcatcctcatcttattcttcactactcacaagtgccattcatctgaacctgactctgcatatggtcactggaaccatattggccaagtagcaggcctacaagggtaaccttgagtgatcgtttgcaactttgcataactggttccctttccatgtagtgtacaaagttttcattccgctcatgaaagacaggaagattgagggtcctcggagaaattcgctgcttccttcaaatccatttacatgacatatggttgatccatgaaggcccattcgaagatctgttcatactgtgaggcggcatggtcccatgtaaagtcgcttgacatgcctcgcttcattagaccctcccaagaggacttgtgttccctgtatgtcgaaattgccatccgcaatgcctgcaagaaacgatgcaaatttttagtacatactccaaaagttcatatggtgtaatgcttgtgccctgaaaataccattttcaatgaggcttttattactgattctacaatgttttctcaacaaagtttgtagctttccctaattattatcttgactacttgagtacaaggcaaaacaaaactgactagtactcacattaaattgtagacaagcaatgcaaatctttccttgtcaaatccatttttttatcagtttcatttgaagtgttcaatgacacaaaatgggccctgtttccctgtttccacattcgaagtatgtaccaaacatgcaattcaaatcatggactggtcagtcgagcaatttagcaacctaagcacatatatgcttcagggttctattccccactaattccagtttcccattaacccaccaagtgctgagccgctttcttctttggatttcaatcacgtgtgttccttttctttagtttgcttgtcaactctttcttataatatttacttaaatctgaaaactaacaagtactaggagttcaatcctactggaataccagacaataaccagaactggctggaacatacgtcatgagcctcaccttgttttatcctttttacttctggcaagaatcaaactacattatgattaccggcaagaaaaatagcagtatacgatacaaccaaaatgcatagttgaaatcatcatgctattgatgttaagagggccaatagtattgatgttgtatggcatatataatgggattaaggaatggatagaagaactaaaactaggtgcaggttcaacataaacttacccacagcattttttcaatggttagtggcgagaatgcccacctgcaatatgtcccaagtagcaacagttaaattaattggttataaattgaataatatacaaaaaaaaattgaatttaattaattccactaaaataaaataaatctgcaattttactttaatgaagcattccttaccctgtaccctgctctcctttctcagcaaacgggttaaaattctccactgtatcctgttgaataaataaaaaaaagtgagcagctctgccttgggtgctgtgctgacataagtgtcacactataggaaagcttactctgaggcctccagttccatgaacaacaggcactgtaccatattgcatagcatatagctgattgaggccacaaggttcgaatctggatggcatcaacaatatatcgcaactgtacaaaaatagaggcatcaatatttcaaatgtaactttatcagcaaaattaattgagatttcaaatgtaaatgcatccttagctgacaaatgactattattggcgaagttattttgcataccctgcagttattcggtgggaaactggaacactaaatccaacccatccacgaaatttatccctgtaccctgattctgtggatctcatccatccttcaaaacctgggtcaccagatccaagcatgacctataacaaaaaaaacaaaaggtgtcattttttttaagaaaaaaagaagtattaaaaggtgtcattgatcaatcgatttcagttgttggctaaaatatgtggataaaattttttaaaacccactacaaacactactctgttttagtctccagttgaaagccagaaacccccaacaatgaagtatttgggataagcacgtggttgcagttcatcaagacatttgctgcctacaagttagatcctactgacttaataaatggtgatccttttgtctgcatgtatacgcgtcccctggtgtctgtcagaagatgttgtttagtgtacccaaaatgtataaagggtggaaataacagactggctggccaagcaggtgctccaattgatatcacactggatggttgctaataagtcatacagtggtcaagttatactactgctatctttcttttatgacttgcatatgcattttttcttatagcactaatatttgcatctgaaatactagtttacttgcatatgcgttcacaatgaaagcaatagctgcatattacattccttagattcatgataacaagctatataagtgtcaatatactactatatacactaagatctatcacattcactttctagtctcacgcagaaaaagaaaacagaacttacgaattgaatattgtcccgcatgagatctggaatggcaagtttaattagatcaatgcctttttgatagtccaatcttccaataaagccaatctgtaaataaagctaataaatccaactgcccataaaagaatactaaaataaataatttcataaatatttgtatctaaccagaggcacatcgggccttataggtaaacccagctccttctgcaattcagctttacacttggcctaaacatgaattcgaggtttcataaattagtctgtgaaagaaacgacgaggtgcaaagaaaaaaatgaaacgagatgacaatctgtatatacatggtactatacttcacctttccggacaggtcatcaacagaataatgataagggagaaacttgtctgtggatgggttccaatcattaatgtcaattccatttacaattcctacatatccagggaatagattgaattaatttgtatcatccaccctattacaatgatcagtccaagaacaaaatataaaaacccaaatataggtaccattcaatacactcttccgggagcttaagagctcattgaggccttgcccaccttcagcagttgtgacctcccatgaatacccctggtaatgaaacataaatgattccttaattgagtgcaagacaaaatgaacgaagaatttgcggtttaaaagccaaggcataaaaatagactaggatgggaaaaaaaaatcaactctaaggttaagttcaaatttcaaattttgactgtggccgtaagccaactagtagacgaaaaggaaggaatctcacctggctgacagtcacaattcgatctgctgtcacaactgcgccttttaaaaaattgactgcctcacccttgtcaagggcatgccgccttgcccactctggaaacacccattctaatgctccataccattcaggtggcaatcccaggtcaggatatgtactggcaggctccacaccctatcacattgaaacacaatgaaatactaacatactgcacttacaaagtgccattacaaaactacttaaaagatatgcaaaatgataggctcaaacctgatgtgctagattatgtatgacaagaacactgcgggcatccctgtaaacaccatatggtctatattttgcagcaagaaggctggataaacaagataaaagttatatttaaattgatatgtaaggaaaaccaatttaacattcagcattgaagtaaaaagggactaaaaaataagtgtgatgagtttttcactggcattagtatcttatccaccgtgaggaacatgccaaaacaaaggagtagcaatgtagcatctgatggatcaaaccatattcataatatgcagcgaaagacattacaccattaacctcatgttgttctgaagtgtcttagaagttagaaagcatgtaccacgcactctcttaataattataacatcaaattatggtgtgaaacaagcagtttaaatttaccacaaattagagggttgcaaactatcacctcagtcacctagtagcatgataggccatttagactacaggatttttcccaaatcctttgggtattgaattgtatctgtagaagatgaactcaaaataggcactaccataataagaaacttcgcactagctcagaaatattccaaaaaaaacataggcagggagattttcagatcagctatgaactagtgtagcacaaaactaaatcatttaaacacataaatgatgtactggactgttcatgtttttggaaatatcaaaatgattgagaaaataatgaaatgaatcgcagttctcctgcgcttttgagaaaaaaaatgattgagaaaatcctcctattcactcaatctaatattttgttcctcttatctaacatagacacacacaaacacaaagcaaacgtatgaaaaaaatggtttataagagatattcaatgttaatcaatttggttgcagagtttcagatccagaacatacactggcacaagactggcatgccaatcattcacaacaaacatgcatttctgtccatagatatatcctcccagttcaagaattaatggggcttcacacgccgcatagcacaggagtgtgtatctgaactgcagtatatagggaagtcaagtcgaatcaatgactcaatgtgatataatttagactggtcaaataggatcttgatgtaagaatacctgattatcgccaaaagcaccaaaattatctccatacaaatttccaggtctatgatatgagggatgatcaacaaacacctgaacaggagaagtgaggtgtaacaaaaaaataagtacccaaaatgcaggtatgctttctacaatcagcatgttgtgtcatgggtgatggtgctgcggagtgaacactaccaagttccaataggaataagtaaacatttggtaaactcaacaaggaatcaatcttgcaaccaaaaatgctagaaatgtttcctcctaggttatacacatccttgttccttaatgattatcatgtcatgccatctacatctattaccagttgtgacaatacatgtttcaatgtaacccacatgttcactttcaagaaataaaaatgcgattgaagtacataattcccatgatataactacaatgttactgatgactattaatgcaatggaaaagccaaacagtacaacttattaatattaagtgcttgttgcaaacagaagtcacaaatgcttgagacataaaatggatacattaagtcatatgaaggaatcttttgcattttgatctggaaacaccagacatcaaccagtgcacaagtgtatagacagtaagacatagaaacagagtacagaatatgatatgatcatgtcttcagtgggataagaacaaaaaagataagcagatagttgttttcatcagaaaatagtaaggagattgaatactcacccaatcaacagaatccctatactcgtgaaaaaaagtaacttcatgttctccgccaaagcatggaatcttaatgtgcttctcagtgtaaaatgcgtttgcaaaatttttgttcaaggccccgttcatgtatctcggcattacaaccatcacacgatgaccacgaagagcaagagcaattggcagtgaaccacaaacatctcctagtccacctgactttgcataaggagaagcttcaccggttacaaagacaacgctgcgtgttactttagcttgagcttgctccttcacatccatgatctcagactcctgctcactagccacaaaaattgttttgtcgatggaatcttctgtgagacctgaatgcaaaataaaagatattcatatggtatagtattggccgagaggcccaagaaaaatacagcagaaacataaataattatcgttttctagccacatcttggcatggcagtacagcagtaatgggagcattacaataatgcaaacaacattctgatctgaataacgccaaattcaggttgtcattgctcccttctgccctctaaataattggattttagagaggtgaggtgaggtgagagtacgtcatataatcaggaaacacatattggtggcagcccagagaatccaacagatagcgaggtgggtctagtgataggaaaagcacatattggtcccaggcgcccatgtgattgtctaggtacacatggaccgtccacagaaaatggcgccatcgaccacaattcagtgcaacgaaaattacgaaatgctactgtcactctacagaaaattcagttgacggctgagaattgaactcccaacttgagtatcgcatatactccgtacttgcctaaggaaaagacaaagtcgtcaatttactcagtttccaacgcttcctacaccaaacctcaccattcctcttcccactaaattacgatatcaaatactactacatcaatggcgtgtctgctcaaacccagccacgtgcacaggcctcgaaacctcccaggtgcccaccccatcgccacccccatcatatcgcgatccaataaatatatatattgtgtatatgtgcagtataaaaattgttagtgatgtgctcgaattggggttccaatttctcgcgtggtaattaatccgcagggtttgttcgattaatcaagtgatcaaaggcgcgcatggaactgcacggatcgggcattgatacgggaggagagggaggatcagcacgagacaagccacgtaccttctagatcgggctcgatctcccccacgccggagtccggcaacggcggcggggtcggcgccggcgccggcgactgcgtgggcgcgggtggcgtcgacgtcggcacgaggaaggtcggcaggaccggctgcttcaccagcggcgccggtgccagcgggcgctgcgccgacccaccgtccctgctcagctccgccacgcaccgcctccgcacccgctggagccgcaacctcctccccggcctcacctgcggcgccaccaggcacgccgccccgatccccatccccgccgccgtcgccatgatcccccctcctctccgccgatcctgctgctgctgtgtcgggcgggccgcgcttggcgggcggtggtggtggtggtggtggtggtggagagagaggagtgggctgagtcgcggagacgatgagagagagagaagaggtgggtgtgtgggtttggttttaagcgagggagaggcgctgaggcggtggggcacagcaaaaacggatcgcggggtggatgagctggttcgctctcgctacgcgcgtggcgtgcgcgcgcgtcccaccgcttccgttccttctctccgttgcttcacgctaaacgaagaaatgtcatttcgccatttgcatttcacttcacaaattcaatttttataaatcacaatggaaaaataaattaaactacaactaatccttttttaaaaaagggtattatttatccgatatgtacatctaaccggatatatataattgtttaaattgaaaatttagctctcaaataactcaatctaaaattcgttcaaatggagatttgaacgtacgatcttgaggcgctaatcaggttaatacatgttctttcgcaaactataactaattaacgtatattcaaaattatttttttttattttttttgtaaaatgtagaaagttaaatttgatcatgcaatgttatgggtttgtgaagtgatatattacatcataaactatattattgaatttttttaaaaaagtttataatgacatctatacctaataaaaaaattcgtaaggtttccgtatggttttttcgtccgtcatccgaatcagaatcatgttgctaaaattgttttaatccgctcaatagtcgggatggatccttttggatctacctcaaaactaggttaatataggatatgtattaattgatgtaacatgtgatcacaagtagcagcttgcctacttggttagtgaagaaaatcttcattgtggccaccagggttcgttcccgccaccctcacctttttactcttattattacaggctttggcccatttaagtttctctcctacctattgattcatttttctttatttgtttttttttcgcttttttcttgggaaaaaaattcctcccgacgctttatctttttttttccttttttatgcggtaagttaggataataacaggtagggaattcactaaaaacaaagttcaatagaaaaaacacataaataatttagttaaaacttttaaaagaatagttgaaaatttcaaatatgtagttgaaagttttcgaaattcgagttgaagtttcgaaatcttaagtgaaagtattcaattttggtatagcttatttttttataactttttaattattaaagtaatttttaatttttagtaaaaaagagaagaagtaaagtagatggtaatactggaaactaattacgtaaaaggaaaaaaagaggtgcgaaaacagaaaagaggagacacggtagcaaccaactgtgcgaatttttttttcaatttttatccgactccttgcgcaagaggtgcgaaaaaatagagaagacaatgtggcaaccaactgcgtgaaaaagaagtctcgaaacaaaagataatataaaaaaaggaaaataggtcgcacgcgactgtgcgatggatgggctcaaaacgcgcaccacttaaattcgcgacgcgtatgcactaattaggagttttgtattattactcgcactgtctatgggcctctcctaggccagattgacctaccctacctaaaacttttacacttattattactcggaataagtctactttgtctccatatctcaaatcctatttgcgtgcaatttttttctctccgccactagcacggaccatgcacatcctttttttttctctccaccattagcacagaccatgcacattcgatggctgaaaagtcaaaagttttatacctctttcttcaacagatatttagtgattctgaaatcttataatgaaccagtttttaatttgaaaattaaacataatttttttttcttttcgtcatctgcaaaacacgacatattagagtccgcaccatctatcgtccacgcatgagctgttaagcgattcgtctccacgcgaatccgtgttggattttagaagtaatatcatgcgcgtgccatgcaagagttgagagagagcttgtgttatgacaatatgagtactatatcaatatgcaatggtgtttcttattagtcttgattatcattaacccaatgaacaatttatctatcttgaaatattattacatacatgttaaccgtgtatttatagcatttaaccttccattatacccgtagcgaagcacgggcattttgctagtgtaaatttacatatggaggcaggtgatgtccacttgatcgctttggcccgttggtttcacggtttttcaccgagtcaccggggactcgtgactcgtgtcgtgtcgtgaccccgctttacgtggcgcgttgccggatcgcgagggcgtcctctgcgtttctctctctctctctttcttttttgtttgggcttggttgtgttgggacgtgtacggtgtgtcctgtgttctgtgtgtgggctgtgtggcctttttgtcagcttgttgagataggttgtcaaaaactgagatagactttgcttgattgccttgtttttgcttttgccagcttgtttcagctgggttaacgtgattgttctagctagattttttgcagggggtgaagtgctgtgttgcactaatgatacagtggttacaaaagctgtgcacagattacaggtagtaccattggccatgagtgagagtttggttcatttgtatttttcttggaagccagcatgcagaggcctaaactatctgttgtttggctttaattagactacttaggaaatattacaatcgcatattcgcatatcaaccagctgtgaaggtgtttgttgctaatccttcattcattcatattcccagtttaatacgtgagatagaagaaccgaagtctcacgcattactctaaccggagtttaaattaattaagctttacttattttagtattcaaataagtgccaaatacttatccgcatgtaaagtttatttcattcacattagtaaatgtcgtcattgtcaagtgcttgtgacaatcatcttgtaactcaatcacgcaagtaattttactattagatcatgaactattgagttgcatgcaccgtacgtctccctcacgcgaggccccctcaagtctctagcgtggaataaaagtatgctgaaatttttatttaattgcacgccagccagaattcgaactcgagacatttagctctgatactatattaagttgcatgcatcgaccagtttaacccaaaagcttaagctgatgagtaaagacgggcaatttactttatattccaacatggaccgtacgtttaattgatatatcgagcacgatcaataatcaacaatgccacatttcggtcttgtttagttccaaactttttcttcaaacttccaactttcccatcacatcaaaactttcttacacacgtaaactttcagctttccatcacatcatttcaatttcaaccaaaatttcgatattggtgtgaactaaacacacccttcattgcatggtagagtatgtaattgaaaaaagaaactactcctggctaaattaaatcgacagcgatgggttacatatatcctaattacatactctaccggctgatcgtccgcgactggtgagttgggccacagccaatggcaccggagttgtcgtcggcgccacgacgacgagtaccaccatcgccgccggcggcgggcgtagctgctcgcaccgagtcgatcatcgtcttgatgacagcctgcgcggggaggatgacggtcaccctgtcctcccggagctcgcggatcttgtcggagagctcggcggcggtgtacgggcaccggtcgttgtcgatggcgtcgatcagggccaggatgtaggccttgttgccggcgatcgacttcttgttgctggcgacgagctcagagatccaggtgagccgcatcgccatcgcctgcctctcgtccatcgtggccagcttctctctcatcctcatctcgtcctcttccatggctggctaagctctggctgctcgtggcttctgcctgctaggctgctagagtacgtgcgtgcgtacgcgtggacgatgagtacgttgaggactcttgctgctgctgatgccgccgcgatgagaaaagtagacagccaggggtctggttatataggcaggcaggcacgcggtgaggcgacgaggcagtcgacgattcggagcgcggagtccgtgtcggaaccgaaaagagctcggcacggattatgttgggctcgatctgtctaggatgtactgggctaaggcccgacgcccgtatccgggccgccgtcaggggttagaattttgaaaaagtatatactccctccatattttaatatataacgccgttgactttttaaacaacgtttgaccacatgtcttattcaaattttttatgcaaatataaaaatacgtatgtcatgcttaaagaatatttgatgataaatcaagtcacaataaaataaattataattacataaattttttgaataagacgaaaggtcaaacgtttgttaaaaagtcaacggcgtcatacattaaaatacggaaggagtacgaggttccttatcttgtcatccctcgactaacaaatccgggttagtctgtgttcctttgaaggggttgggaatccctcccctccgcacgtaaaacggagcgatagattaaaacatgattaattatgtgttagctgtaaaaaaaaacttttaaaatagattaatatgattttttaaagcaacttttatatataaactttttgaaaaacacgcaccttaaggttgtcagtatcccgattcgtattcgaatatcttacgatactacgatcctatcaagccgaaacgataccgatcacacatagaatcctaattttcataatatctcgatcctactattcattactacacgatccaacgaaatcttaggtagtatcccgatgttagggttacagataaggcataccttctatcctacgacttatggaatatacgaatatggtataccttcacgtatacggatcgttcccgtgtacgtggtagaaatccgttccaaattatggaaattatctctacgagtcaagcgatgtccaaagtcctactcggaaatgtatagagtttctgttataccgtaccagatcaaatatcctcgaatctttcttaggggtcaatacgatccacggtataaaagggaccctcaaggaggggtgtgaggacatccaattccatcgccaacacacccaccatagtttacgaagccggagtgcgcggagccaagtcgccgggagatctcgtcgaactcatcgactacgatcttatcggtatcatccgtttcgtctattctctttgtaatctgttctcaccatcatcaatctcatataaactggactatggctattacctgataaggggcttgagccagtataatccttgtcttttgtctgcttgatgttgtactacgtagacccctgctccaacgtaccccaatactcaactcatctggtccgcgagtatcactcgtcgacacccgattctacgatccctacgacactacaaaatattatttaaaataacatggtttgaaaataatgtaaataaatatgctcaaatttatataaaaatcagttaaatatatcaaaaccaacgtggtttttctttgataaatgtctctatttgcatgacatatatcattactacatttattttatatagaatggctatatataattaatataaatattaattaaacttaaaaaagaaaatctcatattattccgatactacgatacgatattactttaaacaaaacgatactacctagtatctcgatcctgacaaccttggataagttaggaactaggaggattcttagacggttttaactcggttttatctgatatagcagctgagtcagcgtggaacccacatatcaggaagaccacatcatcaccctctttctcctcttctctcccttcctcctctctctcactctcctctgggcaagtgaagtctgccgcccggcggggcgaggcggaactcctccatggtggtgcgcggaggtggaggcagggcggagcgctgcggcggcgaatgcagggctccggctgcactccgccgatttctcgccggagccgggccggagcatggcggtgggcacggacagtggcggatccagaaaatcgattcgttggtgtcataacgtgtctatcggtgtcatagtatgctaattatgtttagatcatagtgttataacatatggataaacagttttgctataggttttgccgaaagtcgtcggtgtcgcctgacaccgggtctagtactgtagatccgcccctgggcacggaggcggaggcggaggcggggtcaggcgccgtggtggttggcgcggaggccggcgccacggaggtgaagacgggcgagagcatacaggcgggcgccacggcgacggaggcggggctccggcggaactccgccgtcgagacggtggctttccaccgtgctcacggcctctgcaaccgccgcctccgcttctcgcgcgttgttgtcgttgccgccgccgcctcctctctccttcctctgttctccttcctcctctctccttcctctgttctcgatttctatgtgggctcgaagggaaggctccttatgcatatacggtgttcgatgaaatgtttatcaggtatgatttgctgttttcatcgcattttcgccgcccttttgaggatcaatggatcatcagatgataatgacatgatctacactacatcgcagagaaatgatcggcgccctcgacgtcggccggttgatggatcgatgggctcgggcagcccgtggcgtttgtggccggcgcagttgcagacgaacaggaggacgcctgacagacacagcctctctggagtgatgacctcattgagcagaacgaggccccacctggtcagtgggacgaccaggacgcctctgccgtcgggcggtgacgtcattgcgcaggatgaggccccacctgtcagcgagcaggaggctcgtgcaccttttaaagtgctcgccttggcgctcgcccagagccccaagccgtaaccgactaaccgtcgagctcctcctacctgcgtctcgcgccgccaagaaacccaagatcatcccaccgcgcccccgtctccgcctccgcctccacctccgccgctgctcgccggagcccggaagcgatggagcagttccacgacagggaccacgtgcggctgcggagccgcgtgcacggcacgtacctccacgccgatgaggacgggaggggcgtctccctgcagccgaccggggcatcgctcaccgcggtttggacggtgcacctggagggcggtagcccccagcgccgcctcctgctccacagcgccgcctacggccgataccttgcggccacaggcaagccggggccgagcggcctccgtggccaccgtgtcgcgcttatcaacctcgaccggctggacgacgagtccgtgtcgtgggaggcggttcggacggcgaaaggagatgacgtgctgctccggcacgccacggggcgcaacctacgcgccaaccatggcgctggcgccaccgttgacgatagatacagcaggatgctgctctgggtggaccaggtggttgaggccatcccctcggcagattccgtacccaggcctccaccgatctcaagggtgagcacgctacaccctcttccatggtacatcccgaattggttgggggcaggggagcgattctttagcccattactgcgttacctaggttcttgcagccaagctccatttctggttgtattcttgcgtcagagttagcgcattagcagagtttcatcaattgcattgttcttgatgaaatccttgttgtgttcttgctagatttcgtcctttgttgttaatcatttgcaatgagtttgtggcggtgagattttttgtgcaattttggcttagggggtagattgagttcatggaagtggttgttggttccatctgtagttcttttggtcgaggtgctgaaaatgtgtaacattcttgttcttttaggaacttcttgaaaacactttcattttctgttcttgtgttatccaaatcctactaattttcagagttcataggcaggttggcatcacataaccgttgctgttcgtgttgtcttgcattggattcttcaacgtatatcctgttctctctatctcaactaatttgcggcgaatctgtttcagcgccaggacgggcctgagataagaaccatccggtttgtgccagcagctcctaatgggaccattgccgaggattggagaacctttcaatttactggaagatcagttcagcggttaaaggaagagattacaagccgtgctggggaggcaacccagtactgtgttcaagcaggccggtacggacgtcttatccctttgacacatgagcttcctcacaacactgagaccattgatatcatcattatgatgactggtactacaggtgaggagtttcccttttttattttcatgttctcctcgtatttttggtgaaagaggctcgcttgaatttgttgcactgagctaggtcaatagatattattgctgctcttactttttagttgtgcatgatgtcttaagtttgattctagtcagcaaagtgttataatcttctgcttgaacagatagtccttgtctggttagaaaaatatataaaaatctcattctatagattatatgctcaaggtagtttatacagtattgaattttgttgcgcacttgcgcacattgcactgagctaggcaagtagatacagttgctctaccatccatgcatatttgttcataatattattttagttaagtgtaatcatgtgcaaacgtatgcttataaatacaggcatttctatataccagataataacaatcagtattacattgcagatccccacatggataatagcccaagaacacaactttctgctcctgagtccttgggagaacatcgtgttgctgacattcagacatcatactcgcaccgtctgcatacaaacaatgtacttgagagtcagcaacggaaaacaggtataacacgagctgaacttgaattgaaaactaggaatatccactggggagatttgaatttggaggaaaagaagaggacaagaaaggagttgaaagcagaatacaatgaactcttagctgcagaaaattgcatcagtaaatcgcaggaagatgatgtaattacaaacgaaaattatgaaagagcgtcactccgggatccatgagtccgaggtaaggagacaggagtagaacctgaaatcttcagaattttttcgctccctcaggttccaaaaataagtagctattcagagtttggcttgttgattttcaatctgcgtaaagttgctaaaatatggcctgaagctaattttatgattgggaacaatgacttgttagttgcatgcacactcatgctaaatcctaacatgaaaaatactagttttatattccagtcttcagttaagaaaattgagttgcttcttttattttcatgtccagaccatctgtcagctccttttcagtctaagaaatagtgttagattaaggcagtcttacatgcattgcacatactttaaatataaatagttcacttgtactgctgtattgtatcatacaaataaacaatagacaactccattgccattaaatcatgacaacggcttcagtatgctggtttctagatgagttatccctgttgattttagataatttatgaatattgaacggcttgtgagttgtagtgcctgtaattaacttgtctttaatttcttgtttgatcattgcaaattcagctgctgatggtctgacgagatagaagtcacagaactacaatagcagaacctctgacatcatctcttcagtaattttcgtatcttcagatcaaatgacagagattggatgtcttcttgttgttcttttttgttgatataggcttagaaagggaaaccataaactcttctttgctctgaagtttacagaactgttgtaaacaccaagtactagaatgtatgcatgaacaactgtgcgttctggcatttgctgtagtttcctactttccttggatatctgtatataatatgattgatcataaatttgcggtgtggaatgttatgctctatttttgacaactgaaatgttatgatcaagtctgaatacaaggcaactctttcataacctgttcctgtatttttatacagatgggcggttttgatttccccccttcttgtctgtggcaatatatccatgtaacgaagaacaaagtggcaaatcctttgccacctcacctctccggagtggcaaaaagttaaatatgccatttgctgtagtgctctgaacttcaacttctgaagcaagtaagcagaatgcctgaacaattttgtgctgtgacaatcttttgtcgggaatacacaaaagatatgcgtattattgaattacatttttgtgatgtgctgtgacatttgctatagtctccattttatctgtatgataggaccgaccatccatacatctgctgaagtgaatttttaatgccaattgtaaatgcatgaggtaactctttcataacctggtcctgtgttgtcattcagaatcaggtctgttgtgttaacatgcacagagaaaagaagggttagtaatctcggactgtccgacattagcttttcggtacaaaattgtctccccagaactacttttttttaaaaaaaaaaactctaacattatacatcaaaccttacagaacaattcgatactacctggaaatgaggcattccatgcttcttttttttaaaaaaaagaaataaaacaaaacagaacaactcctaaatcctaattacatgatcgcgagcaccatgggacgaagcgcgggtgaggatggctcgcacgtcgtcgagcatctccttgatcccgtccagcgcggcgtcgacggcccttgactcgcggaggtcgcggatctcgtcttggagctcggcgaaggtgaaggggcatgtgccgtcgtcgatggattcgagcaggtcacgcacgtagcctctgttgctggctatcaaccgctcggtgtccgcgaggaggtccgagatccaccccagctggatcgccaccgcctctctctcagcctcgttcatcatggccctatcttgaaatgaactagcagacgatgatgacgacgatgacaacgacgacgactcgcgctgagatggaacgaacgatgagacgcagcagctgagaccgggagttcggttatataataggcgccgtgcgcacaagcgacgaatcggaatggggagtccgcgtcggaatccgaaagagccgttgaatccgacacggattgtgttgggccgctttctgtaggatgtaacgggccgagtccggcgagactgggccggcacggcggataggaatgcagatgggttcaaccggctccgatcatccgatggacttttggtccgccgacctcggtggctcgatcagaatgtttttttctttctgacatctagtgagaattcgttatttagttatcttctttacggttgctagctgttacttcattttttttcctagctgttgactaagagatagtctgatatgagctcttagttaataaatacttcatccatcccataatataaggcgcccatgcatttcaagatttcatcttcataatattttgactaacatttagtacaatatgaattgaattttacttactaaaaaattatatcattgaattgacatttaaatttattttcatatggttataattttgttactacaaactttattatatatgagaaattataagataaaaattagttttgtagaccgtgtcaagtttgactataccttgtattataggatatagggagtactcacttagtgactattctcctataataatagttgagacaacaattaaattttttaaaaatgttgagacaacaaaacttcttaatcattaattccccccaaaaatatattactcttctttccttttctctatcccgtgcaacaaaatatcatttaataaatgctaagattccccccaaaaaaatatattactcttctttccttttctctatcccgtgcaacaaaatatcatttaataaatgttaagagtcgcctatgagcttttgtaggtcatatttaaatgtagagcccatatagactcttagataatgcatgtttattaaagactatatccttacaatggtagagacaccaaagactctaaaccattaatccacaaatattatctttttattatggttcacacactcatgcaacaaagttttcattttatagaggctaagagtcgttaagcagttgttaaccgtagcaacaatgtctgtctcttcttgcttctctctcttccatctaaccaaattcaattgcatgttaacgtaaagagctcgttaataagaatcttgtacatgcccttgctgtgaagtttacaaactgctgaaatttcaaactactaagtagaatgtgcgcctgaacaattttatgttctgacatgcgctgttagtttcaatggttagttttttagttcgaatggttattgtgcatgataattgatgcaaaccgatcatccacccattccagaagcgaaatatacatatcgttcaaaaaagaagcgaaatatacatatgctcaattctccaattgtaaattaattcatcaggcattgcctgtgtacctttttcactcaaaactcaatttgtcccaacataagtacataggacttgaacccagaaagaaaaaagaaaatcaatccctggcattgaggtgggcccgcccctggacggctggatcagatcgacgggcagacatccaacggccttgattaaactggtcttttttttttgaaaggaaggcaagaaatttgccttatatattgatagagaaggaggattaaactggtcttgcccctgttctgccttacggacgactacggtgaagaccgtcccggactcccctgtccgttatccactccgattcgacgatgatggttcatcgtgtcgtacgccgcggcccaataaaaacagcatgtaaaaatgtaccatcaaaacgtgaaaagctgcagcagcagcaggaagaagaaaaaaagacgccggccgaatcgtcgacttggcgcgtgttccgccgattcgcaaaccccgctcacctgcaggctgcagcatcatccgcagttcccgtgtcgatgtcgacggcaggttcgtttactatcaccccaatccttcggtttttaaccagtacaattttgttttttctatataagatgtactccctccatataaaaagtctaagacatatttcattctttgtttttttaaaagtctaagtcttatttgtagtcactatgtggtaattaaattgttgattggaaccgaagtcattttatattagtacttattggtttcatgctcattggttttatcacatggtgaataaattaattggtcattggtcttgataaaaaagaaatatgccttagacttttcaatgatggagtatttggtcaaaaattttcctaaatgggttattatatctttttaaaagatttgtttcccataatgggacataatttgatttaatttgtgcgggcccatctattttatgtgcatttagctgaatatcttcgaattcgtacgagatatgttacatcgtgtatgtcttctcagactcatgacgttttccgccctacttctacaattactcgtgcttgtctatttgtccactcgtgacggacctatgtttttttttcttttgtcctgggtgtgctcacatagtcccaatcagagttattcatatacacaaacacactaaaagatcttaatttatcaaaagtacattaattacaaatagtgcaaataaagtcttacacacataacgtataaacaatgaaaacaaaatatatttgtgtatgctttttatagcaaatatggcttgattacatcatgattagtgattcatttctaatcttaggaaaagctatatgaaggtgctaatctttacacacttgatcctcctcatatttaccttactaaaaagaaaaatgctaagatttccatacaaaattcttggctacccatgtacttgaagtctagaatttacgtccccgaaatgtttatattgagtaccaaatttgaatcatataaatacttatatttagcaataattggagtaattgaataaataatgtaggtcaaaatttaggaaaaactcagtagtgtcatatacgctccccccccccggccattaccaaatagcatttgtagtattcaatttttttaatataaaataagcattttttttgggacaacgattcgccaagcattttcagccaataagatagaatttgtagcatccaatcttttatacaaaataagcattttgagaacaatgattttccaaacatttttcagctaataatatacttagaagggaaccaagaaattcaaattcaacccatgaagtgactaaaaggatatattttctcgtatatgcgtgcaacaatctaaaaagttgagaaaattttctacatacccctgaaaagttttgtaatctcttctacgccccttgaattttgcatcatcccctacatgcccttgagtatttattttgatctcttatatccctactttgttaattggctgttagatttttctaaaatgaccatatcgcccatttcccatacttacatggggtctacttcataatttacaatgtgaaaaattgttattcctgataaaatcaaacgggggcataattatttattgtaaaattcgaaaaagaaaatttaaattgttgaacaaattattttttgacaattttagctagaagttataaacaaaaattatatatttgttgggctcaaattttgatgaaaacagtgaacgaattacataaaagttaattcaaaatttatttaaaaattctagatttttttataaaatttattgtcatccattgttttaagaattgtgtttttatcactaaactagcacataagtataagagaggggtaatataatcaatttaaaaaatatttaacggtcaactcatgatcaactaacagaatgagcatagagaaaatcaaattaaaaactcagggtatataatttatgaggcaaaattcaggggcacgcaaaagattgaatgaattctcaagggtatatagaggattttctctaaaatgttaggaacaaatagaagtatttaacatcggaggaactgaaattgcgcactgcatagccttgtaatcttgggcttagcaatatgtattccttccttaaaaaaagattaattctgggtatgaacctcgacatgcatgcatcaagattcgcagttaggatataatatttttatagcacagaggtgtaaatttaatgtgactataagtttctaggcgtatacaaatcaaccaaataccagtagggtctttgattcgtgcaggcaaaccattagtcgtcttcttccttcctcgcgtcgcggcatccgccatcgaagctttgctcgcggctttctggccttcctcctgccaccggagacgccaccgccatcgccgcctcctactcactcctctaggaacctacgccgcagaaccctctcacctccctcctccaaccccgcggctccgtccaccgccgcctcgccgcccccgaacccaaatctaggtttttgttttggttcgggaaatctatggctgtcgtcaccggcgccaaagaggagggagagttcgccggcggtggaataataagtcgacgtccctccggtgagctaccctctctcccttccccctcatcccgaggttgaagatgcttcccctaatcctgaggttgaagatgatgccctggcaattggatcataacaggggcgggcccactattgattcaagggtattcagacgtatacccaagatttttagacaaaaaaaataagtatatgtactctatacctcgtatatgtattcaagaaattaaagaaaaaggctaaaactactcattttgggccctgtttcatcgtttcttctctattgggcctaaatttcccacttccctcccctttcatctcagcccacaatcagtttgggccacaactagttcatttcccctcctcgcctaggcacagcaaaccaaagccctaattcccaaatcggccaaaccctaaccagaggaccgaggacgtgcgcggtgtggcggcgaggacgtgcggcagtgcggcggcggcgacttccggctgcgtcggcggaaggcggcgccaaggcgggtaggagcctaggcagcgcgtcgggcggcggcgactgcagtctagtctgcagcgtgctcgtcggcggctgcggcagaggcttccggctgcggcgtgcgcggctgcgtcggcggcaggaggcgccgaggcgtgcaggcggcgcgtcgacggctgcggccgtgcggcgttggggctcggccaggcgtgcaggccgccagtccaccaggccaccacacaggtacgcgatgcggcagccgaacgaccacggcttgccggcctggcatggattgcgtgaggggcttgattcattgattcattgcattgatttgttctaggtagttcaatagtagttatgttttccggtggcgacggcttgtttcattgatttgttctatagtagttcaatagttcactagcaccgaaggattcaacttcctcagttcctgtcttctttatttttcagagtgttaactgttaagtgtatatttattgacagattgatagtataaagctgtaaatattaggaatttagataacttagaaccataatatttaattttcagtgtgttaaatttatatatatgatgatagtatgaggctatatatgagctgttgttaggaatttagagaatttagagagggtgttttcttcgatgaactatataaaaacaagaagcaagatgagcaacaatctacatttattggaagagaattttttgtacaagttaaaggatgaggacatcatcactcatttttaaaatatcaagcattgaaaagttctcctctaaattgtaagttttttttatcattttaccattttctatcctttacatgttatatatgttgccactttcatatgtcgaacaattagtacttatatatgttaaagaatttggacttatgatcaattctatcaatttataaagttatggccatatgctataatattatacaattagtaatgtgtaatattataccaattaattattggacttctagaagtaaaaagaattttgttttacccctacctatttcgaatacccaacctctaaatcctgggcccgccactggatcataatccaacggccaggtccaggtgactgaaatgtgcctagcgaatcctaacatattcgttctttggccccggcgatgagtagcaagtttattactctctccgtttcaggttataaaacattttgactttggtcaaagacaaactgtttcaagtttaactaagttagtttcatcaaatcaataattgaatatatttttataataaatttatcttgggttgaaaatgttactacctttttctacaaacttgatcgaacttaaaacaatttgactttaaccaaagtcaccaaagtcaaaacgtcttataacctaaaacggagggagggagtacatgccaagttgttgtgaattccttgcggataataaaagtcatcatcagtaaattctatatatttttcatatatatccaaacattatttcttttatcagttctacacatacttattgtggtatcagtgctttgatgagacggataccatcctatggtcgtgtatcagaataattaggaaagcctagtgctaaaagctcgaatacctatcctaaaatttctgggaccctgcttgaaaaccaagattttgtctcaattcagactgaaaatattttacacagtgaagaaaaattgtgcagaaaccaaacgtaaactagatggatcatgcattgtttcagcaccttctaattagctagttgtcttgaacagtacactccttgattcttctgtatttccacttattgttccaattccatggataacagaggaaagtaaccttgttgcattcggcatagaaatgggtaacaatttaatacaccaaagaaaactacaagatcgtggccatggtaaacaaatcgatgagaatgcaagaccaggtgtaaggcttgaagaccttccatgggtatgttcatcttaacttcttttctgtttgagtgttgggtagaaatgggatttatttataatctccaaatgtatgtgatgcatttgctgcaggaccttgtagtatacaaaattttatctaaattaccactgaaagaggctgcaaaaactagtgttttgtctaccaagtggaggtgcatctggttgacgtgccccagattgtgttttgatggtcttgcgatgttcaaatgcgaaaggggtgaactgttcttacacgctcggcaattcattgctcaggttaatgctgttttgcaaaaataccagggagaagtggttgaggaatttcatatcagatttgattttcacagcataccagctcattatcttgataattgggttatcttttccttgtcatctaagatgaagaatctagctttagatctgcaaaccaatgatattgaacgatatcctgcacgctacaaattcccctttgaacttttggacagtggaagcttgtccggtctacaacatgtgcagttcagttttgtatctatcaaaccaccttccaagttcagaggtttccctaacctgagaaagcttgatctgcaacttctagatgcctcttcaaaggattttgaaactatgctgtcaaattgcaaacttcttgaatggctaagcatggacagatgccgcctgaatggtgaacttagggtaggtagtccattgccccgtctggtatacctacaagttgtgtactgccaagtaaccaagatacaattccatgctgtggagctagctaattttgtatataaaggagactttgtgcccatagccctcaagcattcgttgaagctggaaaatgcaaacatcaggttatatagtttgaatgatcggcatgctatcagtgacctggtaaaatgttttccgaacttgcaaaatctgaattttcacctttcttggaacgatgcagaggtttgttctcagaaactaaccctccatgctacagttttagcttgtttaacataatctagtgaatgatctttgtccttttgttttccagactaagttgttatcagatacaccttggaagttttctcatctcaggtacttgcggttgaaaaactttgcagattctgggatcgtggagacgaatttttttgtctcttttctcagggctgctccttttattgagaagttagagatccatgtaagtgctcttatcagtaactactactattctccaaactatttcttcacttgtatgttgacatgtcatgtaatactgatctccttttagtatcctgggtataccatgcagtaaaattaggtcagtctgctcacactggtcgttcatgtcttggttttagcatgttataattgactgcatatctgtgtattgtttctgagaatctgtctctgcacaatatatttttgtacttctattcagaaaacaatttcgccgttgtttacccaggagcgtttgcttaggccgtgtttagttcgtgtgccaaatcttttttgaagtatacggacacacatttgaagtattaaacgtagactaataacaaaacaaattatagattccgcctgtaaactgcgagacgaatttattaagcctaattaatctgttattagcaaatgtttactgtagcatcacattgtcaaatcatggtgtaattaggctcaaaagattcgtctcgcaatttacatgcaaactgtgcaattggttttttaatgctccatacatgtgtccaaacatttgatgtgacagaatttttggaagtttgaagggaactaaacactgccttagcaaggttttctttcaatagagtcaagtgagagtatacaattattactttgcagagtgggtatattatcgtatttttgcaaaatttcccaaacagcttcactgcttatgttacatctggatacacacaaacatacagttacattttcttttttttaaaaaataatgatgatgataacaatcactagatgcagtatgtatcatatcctaggtacacatatattaaaggatgtggatctaaacccagctgatcacatattgttatgttttaaccatgcagttttccatgaatttattaatactggatgaatcgcatgaggaccatcctatcaggcaacaacttggacgctgtgaatacaataacctgaagaacatgcgtatcataggatataaaggttcaagagatcaggtcgaatttcttctacatgttgtggagaatgcccctgcacttgaggttttaactctagaggcagctggaatagagtaccaggaggtttcatttgtgttgaatgaagcgtggatcgacagaattactcagagtgccgatagatctgctctgattgctcaacagtatctgagggagaaacttagctcaaagacacagctttgtattaagactactagttccagatagagctagcgctctatgcaagccatgtgaaaatagccattagtgtaagattaattaaataatattattataaacttgaaaataattgagtttatttgatttttctaaaggaatttgaaagttttttttaaataaaaaacacattgtttagcagtttggaaaacatattcacggtaatgaaggaattgcaaaagtaaaaggaggaaaaaacacacccttaacatttgttactctatccatcttaaattgatcatcatacacccttagcatgtacacattctctcttgctacattaattgtattcggatgaaatctgtgtccatgcagttatatgatgatcaatttgagaaattttggattttattatatgataatcaatttgaacagatggagtattggttagttttaaaacaaacaggtcctattgtttagtagtatatctcttctctacaacttaaaaagtataagaaatttccgtcgtccgtaaaaaaaatatagagaaaagaaaaactaaaaaaagaagtccgattccccttaaaaaggaaaaaaaagttcgagaaaaaatagcgaaaaaaaggtagatccgattcccctaaaaaggggaaaaaaaagtccggttcaaaaaacagaaaaagtggcgaaaaaaaatagatctgatcccttaaaaaggggaaaattttcctattcccacgcacggtttttctttttttcttcctttttttcgtttcttttcagttttttctttcccttttttctttttctgtttttttatttcttaatactatgtatgtatacaaactttatatatacacatatacaacctttgtatacgtgtattttttatatgtttgtatataaactttgtatacatctctatctctactctctagtctctatctctactacttaaaaaattcaaaatgtttccttcgtccgtccctacttaaaaaattcagatagtgggaaaaaagggtttgtaaacgagaaaaaaaagtaaaaagggtgggaagcgcagcaaaaaaaaagtccaatttcttcgttttaatagtccgtatatatctcttctctatgcctaatctaatctaatctatttaaaaagagatgttttcatcgtataactaaaaagagaagttttcatcgtacaacttaaaaagaaaaaaatgcgcgagaaaataaaaacggtaaaaatgaaaaaatgcgcaagaaaataaaaatggttaaagaaacacgtgaggaaaaaatgtcagagaaaagcgctaaaaaaaggtttccgtagtcctaaaaaataaaaaaatgtacgagaaaaaaaaatatttccatcatccgtaaaaataataaaaaaacatgcgaggaaaaaacttttagaaaaaacgcacatttctaaaaaatggtttaaaaaaacctcgcatgaaaaatggtttgaaaaacgctaaattgatggacgccttgggtcagataggatccatcgatttttccatctcctacacaacttttgtttggtcatctattctcctgtattagagaccctgcacgtctctatatgcaattatcagactatttttgttaagtatagctactattgttgataacatatgatatggatataatattaaaaaataaacatatttttaattgttatttagagaagagttcacagtgactctattttgtgtagatttgaccatgcgaggtaatgtaggatttgattgatcgtattattggttgcaagaataagattcaaagagtattttagattatatgcatgttgtcacatgaataatctaattattttaggtaaagcaagcatcagtgaggttgtcatcgttgaggttgggccatttcatttaagatgttacaatttttttgattgtcttagctacaaacgatccatacaaacattgtcattgacatcgttatgtatgaaaatcctattttattattagaagtttttcacccgttgcaacgcacgggcatttttgctagtattataaaaatgagacatgcatgaaaaaaggagaatgcaccgcgtggccgtaactaggggtgaaaacggtacagaaattttcgagatttccggctaccgtttccagcttgcaccgaccgtttcagtcggtatcggtaaccgattgtggtggaaatggaaacgggtgatatcttctggaaatggtagtggaaatgggatggaggtttttccgaccgttttgtcggtaaccatatttgtacggtaatttctgtcaaaatttcgaaagttccccagcggctcagctagctcaacccattggaagcccatgaacagaaaaaaattctggtaggcttgcagcccataaaaaaaggggaagtgaccagggaaaatgctgttaaacctatgacatggcgtgtggattttgctgaactttggtctcctcaacttatcgatgtataagtattgttgaactttgtttatattgtttgtcaaacttattatcatatcattaatcatcatataacggtgttatgtggagtgtgatgatgcaagaataaagttaaaaagtcatctacgtgcatagttaaatgtgtgttatgccacactctggtgattccgacatgaattttcgacttccgaccaatatcggtatattccgttccgatggtcccgtttccgatataccgatatcggcgatattgccgatatcgttaccgtttcaagtaccgttccgattccctttttgagaaaaaaaatatgaaaatgaaaatggtatatggttttttctggcactattttcatccctagacgtaacaaacttgtgtctcacgatgtgtgtggtgtgggccccacccccagccgtaacagccggataaggggaatttaactatttagcacttttaggtttgacaattatctaaatgccctttttagttagatttgcagttaattttttgcccctctaaagaggtggtctcttagggcctgttcactttaatgccaaaaaaaaatcttaccaaatgctaaaatttggtaaagttgccaaaattttggcaacttgccaaaattttggtaggatttcttatatagttaccaaaatttaacagcaaactaaatatagccacttttttggtaactttatcaaaatttggtaagattgaaaatggcatcaaagtgaacagtcccttaactatttgccacttttgcccacgccgtggcgcgccagcgtggcaaactctggtgaaaaactccgtgggacccacccgtcagtctctccctccccttcgtctcttcccctgtgttcgttgccccatcgccgccgctgccgcccatcttctccactgctcgaccggcgccgcctcgcggccgaccaccgcggcaccgccccgcagccgatgccaggccttcatcgccgccgccgcctcgcagccaaccatcgccggcgtcgaggacggaggcagcggcccgggcgaggccgttcaccgagccccccaaagctctgtgaaccacagctcgccgccgtccatgctgcaggtatgtatcatcacggtggtcaacgcggcgaacgtgccaccgttgtcctggggtggcgaccggagctagatgctctcgatgagacggaacggatcgccgtcgccgcatcgaagacgggaaagtcgacttgcaatccatccatgcgggaagctccgtagatggatagagaacgcatcggcgacggtgaagcgcagccacgcgcgcagcgtatcgggtggccaccgccccgaccgctgcctccgtccacgacgctggcgatggtcggctgcgaggcggcgccggtgatgagggcctagcgtcagctgcggggcggtgccgcggtggtcggccgcgaggcggcgccggcgtcgatgggggggcgccggtcgagcggcggagaagatgggcggcgcggcggcgatagggcagcgaacacgggcgaaggggagggagagactgacgggtgggtcccacggagtttttcaccagagtttgctacgctggcgcgccacgtgggtaaaaagtggcaaatagttagaccacctctttatctttataaaggaaaaacaaaaaataatttaagatgggtatttgaataattgctaaatctaaaagtgacaaatggttaaattccccggacaaaaaccctcccttctcccccaaatcacacctgattcgggggcgccgcgccgcgaatcgctcctcctcctcctctccggctctctctctctttcctccatccgaaacctccaaaggcaggcgagggcgagggcgagggcgagggctatcaatggagtcgcgaggcgagggcgatggcgaaggagcctcaatccggcgagggcgagggcgagtaatggggtcggagggcgagggcgagggcgaaggcgaaggcgaggaggtgaagtgggcgatgctcttcaccctcccgatcccggtcaccgacgaggagcttcctccgaccagagacctggccatgagcaagcagccgccgccgctcatctcctttctctgccttccgcagcggagcctcggcgaggccgcccactgcttcgttgagatagtctgcgcggattctgctggtcggcttctcttgagcgccaagccgcggccagcaccggccgcaaccacctctgctgctctgcctcctcgtcaaggcgtcatcatcatctgcgacgccacaaacctcaaggtcatgcgcctcccgctgccagtcggcgcgacttgtgatgacaacgagcgcgggttcccatgcctggcggtactcagcgatccgcgcgacgaggaggatggcgatgcctacatcgttgttctactccatgcggacgcgagcggagccttccaggaggttctctgctatgaatccaagaccggaggagtactcgacacacagacccatgaccaggactggagcgacacggagacccacgaccaagactggagtgagaagttgctgtcctgcaattcgcagcagccaccgaggggttggcacagacacagccacagccaccgtgcgatacctctcgatggcgaggtctgttggattgatgctgcttatggtttggtgctatgtgaagttctgttggaggatcccaggcttcggtacgtccagctcccagaaggctgcacgatggatgaagacgatgacatggggtcgcctgctgttgtagagaagcttaggagacgttgtattggtgttagtgatggcaaacttagataccttcagatagacagttcaggacagtcgattgccgtgtggaccttgatgactcttaaggatgtcacattttgggagcatacattctcagtcgatttagtatctcttcgtgctgataagagtttccaggaagcaggactgaacccacacatattcccctcagtggcaggcattcatcctatcgacactagtaccattttcttagtgcagaactcaatcatattttctgtcagctcagatacaacaacttcttctatcaaagttggtgatcaccacaagttcctgctcaacgagaatgagatcactccgagtctgtttctccttccgtggctggttcatgacccagcagacctgcttccccaagagacaccaccgagatcaagtaagcacttctagtttcccttgtgattactacagtgtcatttgatacccccatcatatattgttagtttgctctctatattctgaaatgccaaattgtttttgctcctgccagcatgtttttatcttgtctgaaatgttagaatggctaatgtgggttaagtcatgttgcttgctgtttaggttattcaaagaagtgcctccccgaatatacactgtgaattgataccatgatactatattgttagtttgttctctatattctgaaatgccaaattatccctgccaacatgcttttgtcttctctcaaatgttagaattgttaatgggggttaagccatgttgcttgttgtttaggttatttaaagaagtggctcctcggatataaactgtgatttgataccatgagccatggtatattgttggtttgttctctatattctgaaatgctaaattgttcttgtacctgccatcatgcttttgtcttctctgaactgttacaattgttaatggggattaagccatgtttcttgctgtttagattgttcaaagagatggcttcgtgcccttaaactaaagcaagcactcaagagggggatcgtgtggctgagtgataaccatgaagttgtaactcacgttggagatgtaatagattttcttaccattcctgctggcggttcctttagatctgcagctatttgtgtcaagaaggttggttcctattgttcgaaaacagggaagatattgaaatttcacaattcgaggttacatgcaaatgatccggtcaaggcattgccaatggaagatttccaaatcatcaatgacgtggatgaagatgtcgagtcattgtcaatggaaggtatccacatcgtcaaaaacgtcaatgaagctagaaggtttatcaatcagtggattagctgccagcaaccacatagttgtataatggatgtggctaagtctgtgggtgtggaagagtgcattaatatcttgacgtaccttgggggtgaaaatgccacgttcatgctgatgaattccccgacattccttgagaaaaccggcaacaacttacgcaagtcttctgatttgaaggagtgggtctacctaaaagagtagcagccatttactggagacttatctgactgtataagaggaagacagatacaggagcagaacctctcatggtaaggtttccattttaccccatgtatggctggtcatctttttttttccctgacacagtttctatgcattaatagtcattcacttgtgataatcctttagtcttcagtttgtattttgtcctgcatcttttgtgacaaacttctgcatcgatttctttctaacagagcttggtactgttcttaataaagttatatccatttgtcctctaggaaactgtatagcatgtctggtttggagagacttacctgaaaactgttggaaataatggtttgttggttgccatacatactcatgccccgtccttgtggattttcaatctgtgtacatgtgctaaaatatggcctgaaggtagtttagtaattgggaataatggtttgccctggtatcgaaaatactgggtttatatcccaatccttggttgagaatgtttatgtcctggtagtagtgttgaaggatttaagcccaggtaatctcagtaatatcttttcagtctaagaaacaggttatttgttttaagataatcttgcatgctggttttcatctacaaatgtataatacacaacgctgctgacgttaaatcaagacccagcttatgatgtttttatatgagttatccattttatatttctatatatttattttcttctataacaagatgttttgttagatgatttctgatattgaacggcttacaggttgcgatatatgtacctaacttccttattgttttgtttggtcctctgcaaattcagctgcaatgtagatgcggtctagaggaagacagaactacaggagcctccacttgttcattcgtctcttcagaaatttttgttgcttctgatcgaatgacgcagaattggttgccttctttttgtaaagatagtagataggcacatgctcagaagccaaaaagaaagccgtcaacttttttgttttcctgttactatgtgttggccattatgccgtgaagtttacaaactgctgaaatttccaactacgtagaatgtgcgcctgaacaattttgtgttctgaaattaatttgctgtagtttccacggttattgtgtgtatgataaatgatgcgactgatcatccacacagtttagaaatgaaatatacatatgctcaattctccagttgcaaatacatatcacaatatcaggcattgcctgtatactttttattcactctaattattcctacataggactactaacctagtttaattccttcagaaatcgattatatgcgtggctgaaattgagtagtattgtgctgctccagccgaatactgatggcttcgtcgccgccgccgccgcccctgctgctgccattattcatggtcgtatacttttttcactctatttgtccaatcgtaaatcaattcatcaggcactgcctgtatacttttttccctctatttgtcccaacataagtacataggactaagctagtaaattttacatcaaaactgaacccaaaaaaaaatcaatcccttcagtagttggttacaagcgtggctgaggttgagcagcgttctgctgctgccggaggccgatgccttcatcaccgccgccgccgccattatcatggtcgaggctcgagggccgccgccgccgctagtagcgcctcagtgtccctgcgtatctgatcgagcgagcggcggaccaaggggcatccaacctccctcatgtggcggatcatctcgtggatctcgtcgacggggacgggagagcagccggcgtcgacgaacaccagcagcgcctcgatgatgctttgcatatcggcgaccagctgcttggtctcctccacgcggatgcggctggtctccgggtctggcaactccgacagctgcactgacgaccgcgccgccgacgcctccctctcatccatggcgaccttgtagctgctcgtcagctcgtgcgtgtgcgtgtgtccatgagaccgtgactacgacgatggcgatggctgatacggtggttggttcgaggggtcgatcgatgagattgagacgtagcgtggtgtggtgatatattcggacgaatcggacccggactccggagtccgaaaggaattctaaaagaaaaggaaagggaaaaaaaaaaaaaagagagagagagagacctgtaccatgtactgggccgagtcgagcttgaaggtcggatttggtttcttgatgtttaatgggccagtttcagaagggaaaaggaaaacgaaatgagatggtctactttgtgtccctcaacgatagaacaagttttgattcgtatgatggtatctctcaataacaaaactgcttaaagaatactccctccatttttaatagatgacgccgttgactttttctcacacgtttgaccattcgtcttattcaaaaattttatacaaatatataagatataaatcacacttaaagtactatgagtgataaaacaactcataacaaaataaagtataattacgtaaattttttgaataagacgaatggtcaaacatgtgagaaaaagtcaacggcgtcatctattaaaaaacggaggtaggatttagcagctgatgaagtaccgagacacgcagatgctaatgaccactagaggaagacagaactagcatattttacccacttcatccatctcttcagaaactttcgctgcgtcagatcgaatgatacgagacggaaaaaagaagaagaatggcacgagaattggatattcttttacatagatggtagatataaggtcagaaacaaatccatcaggcaactcctccttaacatgttcgtgtactgtctcacagaaaggacgggttcagatcctcttatccatcatatatagttgactgtagaatgtgtaggttggatttctttcgtgtgatcgctctgtaactgtgattgcgtcaaacatactatctgttttcttcttccccaaagtacaaactgtcgtcctaccgttaggacagcttttacccattttgaaatacaaacagtaccgtaaaagttatcgattgttagaaaactacaagaagatgcacacggcaatatggacttccatgatagttaagtaggtatagtttttttttttaaatcgaagccaggcaaagttggagttatattaaggaaaatagaaagtatttacaatatcaccaggaaaggtgaaagagacagaacaggggaaataaagaagaaaagcaacaaggaaaacctaaaagggagacctaagtggatattctcgtgatgttttttttgccccacacatactccaaagtttgatttcgtcttgtattttggcgagtagttgcggcatggttttctcttgattttgaaaaaccctcctgttccgttcacaccatacttcccataccaccaacatgtggattgatttgagtgctttggccttgcttttgcctccttctgatccaccattccaacagtacttcgttttcatcgtattggtgttctatatcgttgcagttcagtatactcaggaccctctcccagatatggcacacaaaagcgcaatctttaaaaagatgttgggcggtttcaaggttcctatagcatagttggcagaaatagttgtttggccattgtctgatttgtagcctatctattgtccaaactctattttgcaatagaagccatgtaaagtgtttgcatttggaaggtgcccattgcttccaaatcagttttacagctgcagagcttattctaccattaaactgcgctatgtagaatgactttgcgctgtacttttcatttgccgtccaccgccaagttatggtgtcctcgacaccttctgtgagtgccacgccattattccacgcatggtagaataataatacatgaagtgtgtaatccgtggccaattatgcaggacaattaggatatgatgatgttgttcacaccaaaattagtccatatctttattttctccgcataaataattagctgcataaattagctacggactttggaacttaatttgggaaaaagcaaactctttttattcagtacattgtgatatgatgtcaaaacaaaaattcttaaaactagaggcggcagctgatctggagttgtgtcccgtgactcgtgtcttcgccgccgatgccttcctcaccggcgccgccgccattgtcatcgtcctccggaggcaaggatgcaaatagcgccgcgaggctggcgtcgatctggtccagcgagtcagcggccaaggtttctccggcgtcccggatgtcgcggatcatctccaagaagtcgtcggagtggagcgggatgaagccggcgtcgacgaactcctcgagcgtatcgtagatggctctcaacgaggcgatcagctgcctggtcgtcgcgaggtggagcaggttgcagcgcagcagcagcgagccgctcggcgaatcggacagcttcgcctgcagctacttggcgaacgactccctcgcatccatgtatttgttggcgaacgacgacgtactgctactatggttcgagtgttcgacgagacgtacgcagttgcggtctggtttgctttatgtaggcacgcggcgaggcgacacgacttgagtccgaaacgaacgagctggagctggtgaattctttggaataagttcactttgagtccctctatttgtcacccagtccgattttcgtcccttgaccgcaaaaccgggtatgacccgtcccccaacttacaaaaaccgtgcagacgaggtccctcagcggttttgaaggtggttttggctgatgtggcccctacgtggcttgtttgactagatattcgtcccacgtggcattgacatggcgcttacgtggcaattatatctcgaaaaaataataaaaaacatgggacccacatgtcagctaaaaataataattttaaaatggtggccccacatgtcagctactcctcccttcttccccctcccttctctctcatattcatcgtcctctcttcttcatgtgcgcagggggaaggaggcgaggcgaggcgacgggaccatcccccacaccgacaccacccccagcgcgccgccaccgccggcatcttcgtcttcctcctccgccgtcaccgcctgcatcttcgtcttcctcctcgccgccgccgccgccgcggcaaccgcggcaagcaggccggcgacgacgacgtggagatggccgaggggaggaacaacaaggtcgccgacggcggcagcgccgatgactcgacgaccagcggcaaggcggacaccaaggtgtagctctggcgtctcaatcgatccatgagcgatcgagtagctcagtagcatgcaatcggctaagatttgctgcatgtgttctagtactagaagtaataatactccctccatctacttttgatagtgatatttccaaatctgaaaattttatttttgatagacatatttcaatccaacaacctatcatcttaataactttctcggatttaatgcacgactctccattcttccacacatgattggctacatgagcattgaaaaatgtaaatattaatgaatcgtttatttacgaggaatgactagtagcatgtttaaatagatgataagtagaattacttatccttggtctatgtgcaaagatgaaatatgactatcaaaagtagatagaggaagtattagctatcctaaaaggctaaaacacataacgtgtatgaaaggaaagtactatcctaactgaataaaacagcttttacaggcacaagtttaacataatatgtctgctttgatctttatttggaagttgtaattaaccatgtttgtaataacgcgataattaaacgagagtatccatgtgtcaagaggtcaagcgtgacctctcccacaccgtccatggcttccccgccgatgagcaccacgtccgggaggtgattgcgctcacgctccactcccacgcctgcgtcgcgtcgctgtcgcgctgcctgggcgtcacgctcaagatgctggtgctcgtccaccgcctcctcgccgacggcggcccggcgttcgagcaggaggtgttctacgccatgcgccggggcacccgctccgtccacccccaccccccagcgccgccacgccgtcgcccgctccagccggcctcctcgtcgctcggccgccgtgcgccgttccagccggcctcctcgtcgctccgccgcccatgagcgggagagagacaagagggagagagaggggacagagagaagaggttgtgaggatgacgtgtgggtccacatgggcccaccttttttttattaatttgtgtgtgcaactgacatgtgggcctcacaagttttattatttttttcggatctaattgccacatcagcgccatgtcaataacacgttggacaaaaatctagtcaaaagaagccacgtcggcgccacctcagccaaaaccggagtcaaatactgccgagggaccttatttaaacggtttcgtaagttgggggatccgtcgtatcctgttttgtgactaagggacgaaaatcggactgggcaacaaataaagggacccaaagtgaacttattccgaattctttctaccacggattctgttgggccgtttctagaagaaaaaggaaaagggacggcctgtaggctgcattgggccgagcccagccaggctgagccagcacgtggaacgggccgaattcacggaccagtgcagtgcggttggtggggaataagttcaccttacgtccctcactttacacgagtctgtctaagttccctaatccccaatattagaaatcttcacccataaactatacaaaaccgtgtaaaagtatggatatgtggtttcactgatgtggcaacctagtcagcaagataaaaaaataaaaacgttatggggcccacatgtaagtgagaaggaaaaaaaatatggctattcaaatagattcgatgtaaagttaagggacgtcaggtgaacttgatggacacgaagttgctattcagttgaagatttattcaacatttattgtgatataaaattattctctctcattttttttccaagccgaacaagaccttagtttgatgttggtacggaaaagcctactccataatccacagtttggtgacaccttaatctgagagagtagttatctaggttatgcgtgcttcaggtccttacgctctcagggcaaataataatgaaattcacattacccacataactgtcttttagtgtgagcgtcttcatggcttaataagcccttgtgcaggcgaactatattttcgctttccacaatttataaaatttttaataaacaactaaacaaaatcattttagtattgattaaactacatgcggctcataactaatcatttaactatttgtcacttttaagatgtaatgataataaatttaccactcattttctatggcatatggtgcctatgacatgtgagtccagtgataaatatgttatcatcacttgtaatagtggcaaatataattattcctttatttttagccttccacaatttatagaatttttaataaacaactaaacaaaattattttagtattgattaaactacatgcggctagtaatctagagttgtgtcccgcccggcgccgcctatatgacttcctcatctggagttgcctctcgtcgccgcagctcgtcgccgtcgctgccgccactgtaatgatcatgagctggccttgaggtgtcacaccctgaagttttccccattttgcttgctttaaaaattggttaaataaattgcccgaagaaattatcttaattaacctagagctgaattccttaattaataaatacaattaataatcggaaatagcgtggtggaatttttcttgagttccccatgctccaatgcattaacaagatttttagtggaattttcagagccttggaaataattttaaccaattaaaaatcaccaaagtgcaatttttaatcccaggaaaaatcctttcttccttttctttttcttttccttcttttttctctattgggccgtcggcccactccctcccgcgctcggcctcctttctttgggccggcccgttccccttcccctctctccgggacgctgacaggtggggcccacctgtcaggtcgtccccttcctccagccgcccgccccacgacggcaaccgccgccgaaaccgcccgcgccgccgccttctccacgtcgcgcctccactccgcgcccgcacctcgcgcccacgtccccgccctctcccccgcatctcccggcccgcacgcgcgcccgcaaatgggcgggaatcgatttgaatcccccccactttctctctcttttcccccacgtcgccggccaaatcggggggtttcccggccatgtccgcccctttcgagcccctataaagcttccccgcatctccctcttccttttccccttttcgccgcgctctcccgtgcctcctaccggtcgcgcgccgctcgccactagcgccgccgccgccgcccgtctccggccgcgtgccgtcgccactagggccgccgccgcgccaagccgccaccgcctcgcgtcgccggaaccccaccggaaccctatctccctcgcgagccggtgagctatccattcccctccgtctccggccagccattttggtcgtcgcggtcgctttctccatccctaactcctctcctcccctcctctaggtgtctccaccgctcgtccgcccctcctctcgtcgggtcgtcgtcgccgccttcgtcttccgctccggccgccgtgtcgccggtgagtcctccctccccccctcctttcctcaccttcccgcgagcgccggccacgtcgctgctccggccatgcgccgccgcctttcggccgtcgccgccgcttcccgcaccgccggtcaccgccgtcggtggccgtgcctcgccgccgcctcgccttggtcagccggtcggccttgaggccgagccgagcccggccggcgcctccctcgcctcccctttgagccaccgcctggtggggcccacctgccaggcgccacctccctccctttggagccgctgactcatgggccccacctgtcggcgccgccccccccttcgctgacgtcagccctgggctttattgcgcaataaattgattaaggacttttctttattagtaaaaacacagtttatcttctaaaattcataagtaattcatccgagctccgtttaagtccattcaagtctcagtaaatcaagaaaaatgcaaagaatccattaaaaatggttttgtttcctgtttctgtagtcttatagcatgttttgcttgtgtgctttgtttgtcgcgtaggtttcggccgtttcgtcgatccgcagtttctcgaagacgttgctgaggtctcatcagttcgagagcaaggcaagtcatgcaatacgtttgatcatattgtacccaatttacaaatatcccgcatttctattaaatgttgcattcttttacaatgtaatgtgggatgggtcctattcctcagccacatattggttaccctatgccattgataacttgggtatcaaaatgactagatgttggcttagaaaatgcttagccatgcttagttcaactaatacacaaatggggatcactttattacatagactttgtctattggcatagctttagattggtgccaccgcaatggtgttagttaattaaaatacactgaatggtgggctgtgggtgcatggttttgctggtcgcacccatggcagttaaggaccggttcacgggaaaccctgggagacttaccgtgcttaccacaagcgggagtgggtaactgcttgatctgaagtatagctcgaccctttcctaggcaccggtggtgagggtgggcgtgatggagttgggtcggcaggggtgtccggttgtccagctgccggattcaccgcggcgcaagaggggaccgcccactgccttttgaggggtgggggtgaaaccttagcgtggtgtggatggttaggggagggttatgtggagggtcttgtcacgatttccccctttgcagtatcatggtgatacttcggggcatggcgacatgtttggaatcgtgtcttgtgggtacagttgtacacctctggccagagtaaaactattcgaatagccgtgcccgcggttatgggcgatcaaccagattcaccgtgattagtctcacccctagtttagcttaatgaactggtgtagttcaggtggttggttgggcctgttgcaacgtggtgtagcgttggacagtgattggttaatattgattaattactacagctgttttactgctttcaactactgctttgaaatgcctgctttatgcaaaagaacccctagcttcctttggttatatcctgcatcatacctcctcttccggtatgacttgctgagtacagtgggtagtacttagtcttgctctcttttcccccacaccagagttgaagttcttctcagttggagatgtcttgaagaggtgggtttcgtcgctgccgtcaagggttgcctgtggaatggaatcgcccgctgcaggagtcaagtcttcaggcttagctcgcttttaccttttccgctgcatttgtaatcctttatgtttttgtaagacgtggatttgtatgtcaacaattgtcgtttgtgtaccctggctggtcctggacaggggtttaatacacattcagcttagaaattatggttcgtgaatttctgggcgtgacatgaggcatgggtggcactagtacagaagagcttttttcatacgggcgaaatggatctttccatgcggctagcctgcccgcatggaacaaaaggtctgtaaaaatcgctatttctccatgcgggcaacacaaccgcatgcaaaaaggggattttcgcatgcggtccacatagccaaccgcatgcaaagatattttttagccaaaaaaaaaaaatccaaaaaccccccgaaacactaacccgccgcccgccgccggacgccgcgtgaccggcgccagatccacgctgctgcggccgccggccgtcgcggcgcagagccgtgcccgccgccctcgccgcctgccactgctcgccgtcgccgtcgccaagcgtcgtgctcctccgtagggcggcggatccggccctcccgaggacgatgccgccgccgctcgccgccgagagcccctagggcggcggatccgccgccgtaggccgttgtcgtgcccgccgcttgccgccgagacccccaagggcgacggatccggccttcccgaggacggcgccgccggatcctccgccgtaagccgtcgccgtgcccgccgctccccgccgagaccccctagggtggcggatccggccttcccgaagacggcgccgcctgatccgccgccgctcccgccgtctcgccgtagggcgtcgccaccgcggctccttgctgccgtcgcccgctccctcctcgcggccgccgctacgcctccttgcttccgccgctactcccgccatctcgccatcgcccgctgcctccttgatgtcgccgcccgctcctcctagctgccgccgccgccgctcccaccgtcgcccaccgcctcctgccgccgcccaagtgtgagagagagagagagaggacttcacggcggtgaggagggggagcggcagtgaggagggatggcagtggtgccgccgcccgagggagtcaccgacgacggagggatggcgggggagtgagaaagtgagagagatagagagagacgagagatgagagatctacagagagagaggagataataagtgaggggagaggaagagaagataaggtttggtgtgaaatttttgaactggtagagagggaaggaagagggaccatttttacatgcgggccacttaaccacccgtatgcaaaaattgattttttgcatgtggctttttagatttcaaatcgatttttatgtcactatattaactcatatgaaaaagttaccaaaaacaaagttgtagaactcatcaagatctacaacttttattttgaccatttttctatatgactttgtttgaatagtttcaaattgaatttcaaaatatgacaacttcaaacaaaattttcaaataataaatgatttcaaatagaaatgtcatcaacaacaaagtggtataacttatcaagatctacaacttttgtattggtcatttttctatatgactttgtttcgacagtttgaatttgaatttaaaattatgacaatttcaaacaatattttcaaatactaaatgatttcaactgaaaaagtcatcaatcacaaagtggtataactcatcaatatctataacttttattttggtcgtttcttcatacgataaagttatgtgtaacattgttcacaaaatgtacatctgttatatagttttataaactatagagagagatatgtaaattttgtgaaaatgttacgatcactttgtcggatgaaaaaatgaccaaaatagaagttatagatcttgatgagttatacaactttgttgttgatgactttttcaactgaaatcgtttattgcttcaaaatcggcgaccagcggaacagggagcggaggtctatgcgtttggcggcgagggccctcgttggtgggcttggcaacggcataccaattccatcccctttggcatcgagtcattgtatgtcagccatggtgccttgtaacaatgaccatgataacgacggtggtggcaacaacaattgtagtaacaccaccagtaccgaggaaggcttgtggcggcgacagtgaagttcatatattaacctcatgtctaggaatcgagaaaatgatcttatatattcttggaataagtttgtttagagatttatttgtaaaataagttttttaaaatggtcaaagtacttttaaaaaataaaaaaggtatatgctacagtgctacatgtcggctgcgcacggcagggcatgtccaacgccgtgacagcaggcaggcatttgccatccgcactgcatttttttgagcgaaaaccgcattgcacatagtccgtggattcagctcatgccgctcattccatgtgccagatcatcctaaccggacataatacaatatttaggtgacatgcaagaaacgataagatacctccttaaaaattcatctctacttttcccttctcttatagaaacggcccaacacaattcgggagaatttactttttgccatcctctaaaaataccagttctcaaatgccactctccccaaatttcatttccaaataccacctgcgtccacatgtcagccggtgattattttgaaactcgatgacaacatgaggggcctcatgtgaactttttcctacagaatcgaatgacaagggccggcccaattgggcggaatccgagctagtgcggcgcctccgccacctcctccacaaaccccgagccggcgagacgagcacctgccgccgctgccgccctcaaccggcactagcagagcgcagatgggcatcgccacattgccgctcgctgccttcgcgacagggacgagttcggctccgacctgaggcctctgcatgcgcatgcgctgctttggctcgcgccatggctgctcttctacttgcgcacacgaggtgttcgttgaaatgcttgggaagtcatcgcttgctaattactccaatctgatacccttgttttctatgtcccaggggagcacgtaaccaaaacatggcgttctcctagtcttctccccctgttgatcgccggcgccgtagccgtcgacgacgacgctggccgcccgccgtggacgtcggtgagcgcgcggcgtgcagcaacagcagcgcgtgcgaccgcctccggcgaggcgagcatgtggcccccacccttggccaacctgtcagcgaattgaaagtgcggccccacctgccaacgactaactagacgtgagcatgacgtcatcgatcatctgcgggcccacctgtcggcgagcgggagaaccccttgaaattgcggccgccttggcgccgcgagccccaaaaccgcaaccgcctcaacgaacgcctcctccttcctccgccgctctcccctcgccggagcgccgagagaccaagagcgcccccggcgctgcctccgccgctcgccggagcggagcccggaagcaatggagcggttccaggaccggcaccacgtgtggctgcggagccgcgagcacggcctgtacctccacgccgacctcgccgacgggagcagcgtctacctgcacccgtaccgcgcgaccgcgcgcgcggcgtgggcggtgcacgtgctccaccacttcgacggccgcatgctcatgctccacagcgccgccaacgggcggtacctggcggccacgacctcgccgtgggcggcgaccgcggcgcggttcggcctcggcggtggcaaccgcgtcaccctgcgcgacctcgaccggctgccgatgttcgccgccggctggtttcccatcgtgtcggcatccggggacgtcctgctgggtcacgctagcgaccgattcctccgagctatcgacagaggggatggcaatggcgtcaccgtcgaggtgtccgacagccgcagaccgaacacgccctgggtggtggaggccatccccccgatagaatccatacctcgccttccacatcttgtggtgagcgcgtcatgccctgttttttcgatcctttcttaactgattgcatgagttgggttctttggggatcaattgctgatgctttcttgaaccagagcttgcagattgtggcaagttgagttagttttgctcttctgggcgctattatttggttctgatgttgcgttgtttctgcctctgttgctaatcgtgcgtcctgagttgttcatgggaaagtaattcttagtagcattagtagcatttgggggtcatggtgtcaattctatttctgtatgatacattcgtagtggggagcagttcttggttccatcaggttgccatcttggttcttcagttcttgcttgtccgcatttgcttccttccagggtgcagttcttgggtcacaaattccattttcggttccgtttacttaaattttctgtccgctctatgaattttccttttccaagattatttcagtacggttcttgaaaatggcaacactacctgatcaccattgccgttctttcttaatgtgttcttggtcctcggtcacacagtgtgtgatgaattcttgcaaattgtaatgaattcctttgtgccatcttctttgctgcagggcataggacacattgcacgggcaatccggttcgtgcgagcagagcgggcatctactgatgggacctttccccatgtcgcctgggcttgtttcgagttcaccgggaggtcattgttcaatctgaggacggagctggcgcgtaggttgaactttgcagtggtctccgatgtcattatgtgtgttcgagcgggcttgtttggacggctgactcctctgatcaccgatctgcctcccaacaatgtgaccatggagatcatcgttgtcacggctgggacgattggtgagatttcgtttttatgtacctgtgtattactggttatcgccttctcttttcatgacagttctatagattacatgctcggtattccatagtcttggttagtcatactgttgctgcattttccctgacaacttttgtattgacatcatctagttaaggagaaactactgactactgttactgcttttaataaagttctatcacttgtcatcaaggaaactgtgcacatgtatagtaaggagaaacttatctgaatgttcttgtagataaggaaagaaagaagttgagtgaaaataagtagttattaagagtttgtcttgtggattttcagtctgtgtacagatgctaaatatggactgaaactagtcatgtgatcaggaacagccattttttagttgcatgcatagtacatactcatgctcaatcttgatatggataagactggttttatgcatcctcagtttgaataactcggttgctttttttttctttattttgccctggtattagtgttgaggggtttaatcccagatcatctcagtcagctcttgtcattatgagaaatggggccttcgatttaagacattcttacatgccttgtgcctactctaaccgtaaaagagttcacttgtacattagtaccatatcaagatacaatgcaaacactgtttccattaagagcaattttacggtccttaatgaggtaccatgaagtaccattttttctattgtaaatttggtacctcatggtacctaggtactatgaggtactaaaatttacactaaaattttagtacctcatggtacctcctcaaggaccgtagaattactcttccattaaatcatgcttccggtttctgctcactatgctggtttctatgagtttttcattttcttctttaacaaaagggtgacccagatgtttacatgatgtctgaattgagcggcttgcgagttacaatatctgtacctaactgccttattattttgtctggtccttttgcaaattcagatgccaatgagttgagattccccaatgttggtgcagtctagaggaagacagaagtgcaggagcagaacatctgacagtcactcccccattcatcgtttcagaatttttttgctggctcagaccgaatgacaggagaaatcaatggaataggcttcagaaaggaaaccaccatctgttctgtttcccggttgttagctatgggatgctctgatgtcttgaatgcctgaacatcgcgttctgacatttgctgtactttccattgtcatctgtatgatatgactgatgatccatacatttgcagatgtgaaatgttgtgctcaagtctgaatacacagagctcatctgtatgatatatagtactacatcttttgacattttttgctgtgattcctgtgttatcattgtgtttgatttcccttatgtctacaccaaaaagcagtcaacatcttatccagataaatagtggtggttggttataaagatttgctgcaatgtttctgactttggcaaattattttaattccattcacttatatgtattgtgcataagagtaaatataagatcaaacctaagcaaagtcagtttagtacttaaagtcttaaactgcatgcggccgatctggagtttgtgttctgttgctgccgatgcctttcctcacaggcgatggcggatgcgcgcgccgccgccgccgccatcgccgcccgtcgcggcgttggacaaaacccgatccgccgttgggcgtcggcacgtcgcagagcgccgctgttggggcctccactgcttctctgctgccgcggcgacaggatgagctctgttcttactcgcacacgaggtgttcgttgaaatgcttcggagtcggttcgcttgctaatcaggttgcttcttgatgtcacagggaaagcacacatatcgagcatggcattcacgggcgcggtggtcgtggacgacgacgccggccgcgccgtggtgagcgcgtgcgtggcgtgtggtgcaggtgcagcagctagctctcgttgcttccggcgaaacgggcatgacgtcatccagcatgtgggaccagcgggcccacctgtcagaggagccggaactgcggccccacctgtcagcgaagggggacaactcctttaaattgcggccgccttggcgctgacgctgagagccccgagccgtaacaaactcctctcctctcgccggagagcgcaagaaaccaagcggcgcgccgcctccgcctccgcctccgctgctcgccgaccggagaggcaagacatcaagagccccgccgccgccgcctctgccgctcgccggagggaggcaatggagcagttccacgacgggcaccacgtgtggctgcggagccgcgcccagggcacgtacctccgcgccgacgacgacgggagaggcgtctccatgggccagggccgcgcgtccgtgcacgcggcgtggacggtgcacacgcaccacctcaacgccggcgacgtcgacatcctcatgctccacagcgccgcgaacgggcggtacctggcgacggggctcgggtggacgcggcggcgcctcctcagcggcaaccgcgccagcatcatcctccgcgatctcgaccaggaggtgttcccccccgcctgctggttcgctatcaggtcggggtggggggacgacgtcctgctgcgtcactgcagctggcgcttcctccgagctgacgacaggaaatggaattggaatcggaatggcaccggcgtcatcgccgacatgatcgacggccgccgcctggcgaggtggcagtgggtggtggaggccatccccccgaggaactccatacctaggcctccgaatccttcggtgagcacgtcatgcccctgtttcctttcctgattcttgcataatcgattgcgttactgggttcttcagggctaggctaattcttgatcttttcctgtgattgctggaattttcgttactgggttcttgatcttttcttgtgattgctgcgaaattctgttagttccgcctctattgctaatttgctaatctcgtgttcccgggaaagtagatcttactagcattttagctctaggtgtccattctctatgttgcattcgtaaggaggggggggggggggggtggagcagttcttcgtttcatctgtcaggttgccacctatgttcggttcttgaaaatggcgacatccccactgctgttctttcttactaagttcttggtcctcagttacttcgtgtttgtaacgatcttctttgctgcagccctcattcggtttctttgcgcgtcgcatcattttccggcgattaacacataatgatttacaatgggtttggatctggttcactgggaggtctgcgctccatctatggaaccagctgtcgagacgaatgggcttcgaaccagaccccaactccactatgtgtgttagagcaggaacctacggacggctgactcctctggtgaccgatctgcctcgcaacaatgcgacaatggtgatattcgttctcccacctgagtcattaggtgagatatgtacctgtgcaagacttgctgtcgccttcttgttttatggctattggctaatgttctatagattacatgctcatggtattcatttagtcttgaatctctcgtgcgcattgcagtgctctagatcagtcgtactgttgctgcatgtttcatgaaaatttctgtgctgatttctttctaatgaaatgctatcaataaagtccaatccacttgtcctcagggaaaattcctatagataagaaaatggactcaagtaagaataagtaggtattcagagtttggcatgtggattttcaatctgtgtacagatgctaaaatatggcctgaagttaattttatggctgggaaggtagtagtgttgaggggtttaagcccagaccatcccaaatcccaatgagatcttttcagtctaagaaatagttgtttttttttaatttaaggcaatcttgcatgtgttgtgcatactctcactgtaaaaaagacaataagttaatcttgcatgcgttttgtatcatacaaatatacgatagacagcactgctgccgttaaatcattacaccagcttctgctcattatgctggtttctagatgagttatccgttttattttgctgttcattttcttatttcacaaaaaggtgacctcagatgtttttagatggtttctgaatattgaatggcttgtgagctgtaatatctgtaattaacttgtctcatcgttttgtttgtccctttgcaaattcagctggtttggggttgacgtgccccaatgttcatgccgcctagaggaagacagaagaactacaggagcagaacccctgacagtcacttgttcattcgtcccttcagaaaattacgctgcttcagatcgaatgacagagaactgaatgtcttctctctctctctctctttggtatcaactcttctgtttcccggtcattagatattactggccattgtgctctgaagttcacgaactgcattaagcaactaaggagaatgtgtacctggcaattgtgtgttctgacatttgctgtagtttctccatcgttatctgtgattctgtatgacacgagtgatgatcatccatacatttgcagaagtgaaatgttatgctcaagtctgaaatatagatcaggcaactctgcaaaagctgatcctgtatttttcatgcagaagggttgttttatgttttcccttttgtctgttgcaatgcatccatccacgtactgaaacttttatctgttaatgatatcggatttgcaccttgtttggtagaaaattgagccctcccagactcgagttatagagtcatctgggtgcaggttccaaattaattactaattaccgctgcagtgtatttcagacttgggagctgcagtatttgtgcttcccttcatgtccccagttttcagataggagtatgaatttactgttctgatcagttttcgcagtcttctttgcgatcatagaggatcacagcatgaaacattttctgtatcccagtcagaagtgaaatgttattctcaaatctgaatacatcaggcaactctttcagatatattgctctgtagttcctgtgtgtttgtatagaaagattgttttgaacttctgattttccccttttttttctacaccaaaaacgcagtcagatgaacaattggtggttggttatggatatcagcagctgcagtgtttcagactttggatctttgagcaaaaacaatttattttaattccattcacttagatacagtgcattgtacataagagtataacatcagaactaaaaaaaaaaaatcaaatcagtactgtactaagtgatacttaaccacatataacgcggctcatctggtgttgtgtcccgtcgccgccgaatcaccgatgccccttcctcaccggcggtgccactccaatcaccggcagaagcgtagtcgtcgacggcgcgtggaatgggccgaacccaccgactagtgcagtgcggcagcgctcgccgcgccggcggcggccgtcgtggcggcgttggacacacctgagcaatggcaactgccgccgccgccgcgctcatcggcctgtggccgcttgcgccgtcggcttgggttccacactggtgttctctgccgccgcggccggcgacaggacgggttcggttccgaacgcctcagcacggctgctactcgcacaccaggtgttcgttgaaatgcttcggaatcgttcgcttgctaatctggttgttttttgtcacagggaagcatgacagcacgacgcgtggcattcctagtcttcaccgacgaccgtggcaacaggcagcagcagctagctctcgttctcctctgctcgacgcctccggcgtcgcgagcatgacgccatcggcattgtgggccccatggcccacctgtcagagaagggggaggggaggtgcaggtgtgggcccacctgtcagcgaagggagagaactccttcaaattgcggccgccttggcgctgtgagccgtaactgtcgcaacgaactcctcccctccctccgctctcccctcgccggaaaaccaagaaatcaagaaagcaagagaaccctcgccgcctccgccgctcgccggaggcaatggagaagttccacgacgggcaccacgtgtggctgcggagccgcgtccacggcacgtacctccgcgccggcgaggacgggagcggcgtctccctgcacgagggccgcgcgtccgtgcacgcggcgtgggcggtgcacattctccacctcgacggcggcgacatcctcatgctccacagcgccgcgaacgggcggtacctcgcggcccccaggaccgggtggtcgtggaacagcgtcgacctgcgcgacctcaaccagctcccgtcgttcaccgtcgggtggttcgccgtcacggcgggttccggggactacgtcatgctgcgtcacagtagtagcgggctcttcctccgagctgatggcgggaacctcctgtgcaatagcgtcggcgtcgtcgtcgacatgttcgacttccgccgcagagagatcaggcagtgggtggtggaggccattcccccgagagattccatgcctatcctccccaatccttcggtgagcttgtcatgccctgtttcctttcctgatgcttgcagaattgattgcattactgggttctccggggatcaattcttgttcttgatcttttcttgtgtctgattgctgcgaattgtgttaattcctttctcctggatgcgattctttgctctgtttttgccatagttcaaggtgtccattctctatggtgcgcattcgtaggtggagcagttctctatgttcttcagttcttggttgctctgcatttgcttcgctccgtggtgcagttcctaggacggttcttgagaatggcgacatcattattgctgttctttcttactactcgtatgttcttagtccttagtcacttgtgcttgcaatgacttcttgtatacttttgttttgaaacttgacttcttatatgccatctaattctttgctgcagcccacagctttcagctggtgccgcatctggtacgtgcgagcatctcctcaagggaatttccgccgagaagactggcgttcgttattgttccatgggaggtcagtgttccatctaaggaacaggctggcgagtcagttgcgcatcagagagtcctctgacgccatattgtgtgttcgagcgggctccactggacgggtgactcctctggttactgatctgcctcgcaacactttggtgatagacattgtcgttatcacagccgggacgaatggtgagatttccttttatagtgatagattacatatttacatgttcatggtacttcttaagtcttgaatctctcgtgcacattgcactgagttaggccagtcataatgctgttgcatgtttcatgacaacttttgtattgatttctttctaatgaactgcttttaacatagttctatccacttgtcgtcaaggaaaatgtatacatggtttgttgagagaaacttatctgaaaattcttgtagataagaaaggagaaacaagtgaaacttcagagtttggattgtgaattttcagtctgtgtacatatgctaagattcagagttcagtgccttcgggcatccatctgtaaataacataaaaaataaaatgacttgttagttcagtgatctttgtaaagcttctttgttaatgaattagacaatcctgaagctagttcagtgattcagaacatgacttgttagttgcatacatattcatgctccttttgttattttgtcttgttagtagtgttgatggatttaaaacccagatcatctcagtcagctctttcatgtctaagaaaaagggtttttgactttcagacaaccttacatgcattgtgtatattcactgtaaaaaggttcaattgtacagttgtttcatacaaatatacaatagacaacactgttgctgacttacagttaaatcatgacaacagtttatgctcattgtcctggtttctagatgagttaccccttttattttgctgttcattctcttctttctcaaaacggtgaccccagattttttttcaactgatctctgaatattgaatggcttgtgagttgtagtatctgtaattaacttgtcttttttttttttttgctcctttgcaaaattcagctgccctctggttgaggtaccccaatgttcatgccgcctagaggaaggcagaactacaggagcagaacctctgacaatcacttcttcattaatctcttcagagttattcgctgattcagatcgaatgacagagaagtggatgtcttcaatttttttttggttgattcaggttcagaaagggaaactgtcaaaaaccttctgtttcccggtggttaattagctataggccattatgccctgaaagtttacgaactgctgtaagcaactaagtagaatgtgtgcctgacgaattatgcgttctcacatttgctgtagttttccatggttttctctatgattcgattgatcatctttttgtagagtgcaatgttatattcaagtctgaatacatcagccaactcgttttcataacctgtgaaaaaaaaaaggtgatgggctagacgtcctgagttcgaagcctcacccattctaattatttgatattaggtcattctctgatattcgtgtttttttttcataacctgtgagtgattctttgcttccatttgctagctgttggcctaacgctctgaagtttacaaactactgaaatttctaactactaaatagaatgtgcgcctcaacaattttgcgttctgatatttgctgtagttaatttccatggttactgtgtatgataattgatgcaactgatcatccacaaatttcagaagtgagatactgagatatatgctcgattcttcaattttacattaactcgcatcaggcattgcctgtcatctaacctggagtagtaaatttgacatcaaaactaaaaagaaaaaaaaatcaattccttcagtaattggttacatgcgcgattgaggtttcttcggcggtgggtgttcccaactccttaccttcgttttccacgtgcacgtttttaaaactgctaaactgtacgcgttttaaaaaaaaaatagaagaaagttgctttaaaaaattatattaatccattttcaagttttttaagctaatatttaattaatgagaacttttacggtacaatatactactagtatatactgccaatataaatgatctaacggtgtagattgaattacttaccacttacagtataaaattaaaaagggcatatttgtctttctattttattgcgctggggcaattccgttaattccagcagacaagcacactactgggtgttccttgcaagatccaatagtgattccccatgcccgtcattcaccccaggctaaggccgtcgttcacccaggcaaaggtgcaccggtgtgaggctgtcagatattgattaatttcctagtttgcattgttgatatgatgttcattggatgtttggaagatgtagattaagcgtattaattaaaggaattaatggtgattaagtactacatgcggctaccctgcttaagattgctgtatgttggtagacggtacagcccgagcaccggcctcgggttgccggacctagctccgccactccctataccattgccatcttcagattaaaatggcatagagtatttgtaagaacatgacccctcttgcagattgcatgaacgaagaagagggtaaagagtaaataacatacatctgtagactgcacatgtatgcatttttatgcacagatcagggcgtatgcttgtagagtgcgcatggtgtttaattctactccggctcggcagagggcactgcgttgccggctggcttgccgccagtatgcgggactgcatgtggccatgccaccacagggagatggcggctgttcgctttggcgggaagagggacaccgaggaattccgccgccgacgaggacgaattgcgccgccggtagggctcatctctccctctcactcgcacgacggcatcaacagatagggattgatctgaaaagcgaattactaaattgcccttacatttttttagcatattcctataatacccttgaaaatacttgcagtatatactaacagtatattgtactgtaaaagttctcttaattaattacttgttaatctatcgctccgttttctatatggaggggaacacaagtagtgttcggttgctgccgaacgctgccgacgtcttcctcatcgccggtggcactgcaattctcgccgccaccgacgtcgtcgtcggcgtcgaggtccctgcgtatctgatccaacgagcggcggaccgcggcgcatccctcctcccggatgtcgcggataatctcgtggatctcctcgacggggtacggcgagtagccggagtcgacgatcttgagcagcgagtcgacgatggtgttcatgtagccgatcagctgcttggtctcctctaggctcatgcatctgggctccggatcatctgccaactcggacacctgcaccgccgacgactccctctcagtctcagtctcatccatggcgattcttggctcgttcggcgacaacgacgatggctgatacggtggttcgattgagtcgatgagatcgagaatttgagacggagcgttggtctggttatattggcacgcacgcaggccatgcacgattcgtacatggactccaagtcccaaaggaaaaggatttgtattggccggttctaaaaagaaaaggactcacgtgttcgacaaccgaaccacgatcatgcagtgggtggtgttcatggtccaccgtacagtacatatatgtatgagaatcagggtttaatctggcggaaaaccgacaaatcccgaaaaaatttcgcggaccaaaatttgaatacaaatccctaagcttactgatatgttcacaaaagccggtcagcttcggcaaaattccaatagaaaccatcaaaatttcaataggaaaccaaaaggtaaaacgtgctgaaaactgtccggttttatcgaaaagccgataggtatcttcgaaaaaccgataagaaaaccaagtttgttttttgttagaaaaatatagaaaaaaatgtgataattgggaaaaaaaatcgtgaaaacgttatttcctataaatttgataacctcccatcgacatacccacgatatgtaatatatattcataaaagacagttcatatcactcaccaaccatcggccaaatagaatgcccatcaccaaatacataactctgtgaccgatatattgcaagaattaatatatttccagttgtttttcttccctgaagaagcatgtcatacaagctgctccttcagaagttcactattcgccgggcttcagaagttcactatggggtgcattactgacaattcaaatttgccgcagttaattttgaaatttggatttgggttatgaaatttggatcgtagttacatcatgtattttcttggacctactgaaagttgctctactgccaaagtgccaatgctggtttgggcctctctcagcgaagccttcatttgggcgcaattttgcaaatcccccaaccaagccatttctaccgccggccgtcgcggcgttggacacaccgaacccccgagccgccgccaccgccaccgccgccgccacgcgaggtcggcacgtcgcagaatgtatctgggacgtcgacctgcggccgctgcctctgttgaggcctctactacagctgttcgccgtcgccgcgacaggacgaattctcatcttcttccgctccgttctactcgcgcatgaggtgttcgttgaaatgcttgggaatcgttcgcttgctaatctggttgttttttttttctgtcacagggaagcagacaatcgagtatgtgtatggctttccttctcctctacttaccagtagtcgtggacgacgaaactggctttttcgccgtggcgccatggaccttggtgagcgcgccatggtcgggtgcagccggcagctagctatcgttgcttccggcgcaacgagcacatgacgtcatcgagcatgtgggcccggaggcccacctgccagcgaacgcggggactgcggccccacctgtcagcgaagggggacaactcctttaaattgcggccgccttggcgcctagaatcccgagccgttaccgtcgcaacgacctcctctcctcccttcgctctcccctcgccggagctccaagaaaccaagagcgccgcgccgcgccgcctctgccgctcgccgatcggagctccaagaaaccagagccccgcgcctcctccgccgctcgcccgagtggagcggcaagaagccaagaaccgcgcgtcgcctccgccgctcgccggaggcaatggagcagttccacgacgggcaccacgtgtggctgcggagccgcgccaacggcctgtacctctgcgccgacgacgacaggagcggcgtctccctgcagcaggaccgcgcgtccgtgcacgcggcgtgggcggtgcacatactccacttcaacggcggcgacgtcctcatgctccacagcgccgcgaacgggcggtacctcgcggcctacagggccgagggatcgtggaacgtcgagcggctcaacctcaaccggctgccgtcgctcaccttcagctggtacgctctggggtcgagatacggggacgacgtcctgctgcgtcacttcaagagcatgttcttcctccgagctcttttcaggagggatcgtatcagcaatagcggcgccgtcggcctttgcgcgatggaccggggcaccacgaccatgcagtgggtggtggaggccatacccccaagagagtccatacctacccttccagatcctttggtgagcacgtcatgccctgtttcctttgctgatgcttgcagaattgattcttgatcttttcttgatccttcggtgagagtcgattgcattactgggtccttcggggaccaattcatgatctgttcttgcgtcagatttctgcaaatagtgttagctccgttcttatctgcaattcttggctccattcttgccatatttcctcctctgttgctgatttgctaatcgtacatcctgcgttcatgggaaagtaattgttagtagcattttagctcaaggtatccattctgtatgttgggagcagttcttggttccatgtgtcatttcttcagttcttgccccctctgcatttgctctgctccagttcatgaaattggcgagatcacaattcctgttttttttccttactactcatatgttcttagtccttagccagtgcttgcaatgactggtgtgttctttgcagccgcccagttctttatccggtgtgtaccgcatctggtatgtgcgagcaaatcctgatgggattatctccccaaacgactggaggctgttcttattctacggtaggtcagtgcgcaatctaagtgcattgctgtcgattgagttgggcatcagaaggccctccgacgccattttgtgtgttcgagcgggcttctttggacggctgactcctctggttactaatctgcctcacaacaatatgttgttgaacttggacattgtcgttatcacagccgggacgagtggtgagatatccttttatagtgatagatttacatatttacatgttcattccttttgtcttgaatctctcgtgcacattgcactgcgctacatcagtcgtaatgctgttgcatgtttcatgacaaattctgtactgattcctttctaatgaactgcactagatcagtcataatctggaaattcttgtacataagaaaaagaaatcagctgaaaataagtagctattcagatttggattgtggattttcagtctttgtacatatgctaaaatacctgaagctagttcagtgccttcaggcatccctgtaaaactcctcttttattaatgaattaggcatcctgaagctaggtcattgattcagaacaatgacttgttagttgcatacatattcgtgctccttttgttattttgtcttggtagtagtgttaagggatttaagcccagaccatctcagtcagctcttttcagtctaagaataatggtttttgatttaagacaaccttagatgcattgtgtgtactcttttttgtttttgctgggccggcggaagagaagtcgtctgattttttgttaaaggatgaccccagatgtttttagatgatatctgaataagtgaatattgaacggtttgtgagttgtagtatcagtattaacttatgttattgtttcgtttggtcctttgcaaattcagctgctgatcggttgagataccccaatgttgatgctgcctagaggaagacagaacaacaggagcaaaacctctgacaaagtgacaatcacttcttcattaatctcttcagagcttttcgctgcttcagatcgaatgacagagaactggatgtcttcttttttatggttgatataggttcagaaagggaaagcgtcaaaccttctgtttcactgttgttctgaaggttatgaactgctgtaagcaactaagtagaacgtgtgcctgaacaattgtgcgttctgacatttgctatagtttccatggaagtgcatgattcgattggtcatcgttttgcagagtgaaatgttatgctcaagtatgaatgcatatttctcatgaccttttccctgtattttcgtacatatgtactgctttgtgtatggcaatgtattcatgtgccaaaagaacaaggcttaattttcttggctttgcattttggtagagaattgagcctcaaatttcagagccatttgggtgcaggttttcaatttcagatttagagtaggcttactgaataccttacttttgcgtaggtatatgttctgaaaaaacggagcaactcttgtgtttcctggttgttagcttcaatgcagacatcaaatcatctgtttgttatccctggtgctgtttctccctgacaagaagctgtgtatgttttggcctttatgttatgaaactttcagactgctgagtgctgacagcattaggtactagaacatatgcctgaacaattgtgtagtggtattggttataattttcaccttcgtctctgtgactgatagcaagaacatatggctgcttgacaaataaattccgcagtcaatttttcgaagttggatttgaattgtagaatgtggatcgtagttaacatcatgtataccaaaagctcagcacagagatatcatcctgtgtatttgttgtcgttctagctacagtagtaacaatgagtattttgtccttcaacctgttgaagttgttttcagttgttcacaaataggccatatacatttgttgagaaaaaatatcatccgagggcgtttggtctagtggtatgattctcgctttgggtgcgagaggtcgcgagttcgattctcgcaacgcccctattttactttctttttcataatttcatttagtgctgactttgttgcaactttgaactttcatcatgtagaattttcctgaatcctgatgtctactcacaaattatcttacgagccagtctttgaaattcatttggatttgaattttacgcaattttatactgaatcacttcctactttcatttagtgctgacttgttgcaactttgaactactttcatcgtatagcattttcctgatgtctactcacaaattatcttattaccgtattacgagtcagtctttgaaattcatctggatttgaattttacgcaattttatactgaaccacggaatcagttcatctttttttagcattgaaaaagttcaggcctctcaagcttggactgccacttgctccacccaacgcgcgagtctgtgtgccgccgccgccgccgccgctccgatggaaaccgccgcggcggcgccgccgcgcgtgcaggccctagccgacgccggcgtctccttcctcccggcgcagtacgtccagccgccggaactccgcccggaccccaccaccaccacccaccgccgcgccccgaccgccgcctccctctccgtccccgtcgtcgacctctcatcgcccggtgcgggcgacgccgtccgccgcgcgtgcgccgagtggggcgccttccacgtggtcggccacggcgtccggccggggctgctcgacgcgatgcgtggggcggggctcgccttcttccgctcccccatggaggagaagctccggttcgcctgcgaccaggccaggggcgccgccgccgaggggtacggcagccggatgctcgccaacgacgactccgtgcttgactggcgcgactacttcgaccaccacaccctcccggattcccgccgcgatcccacccggtggcccgatttcgtccccggctacaggtgattgcttgatcagttcatgccttgaataattgcaactggtacagatttttgcatgcttgaaatcattgagaaaaatgagagtcaatgttcagatatgataacaaatagaaagtgggcaaggaaaatttggtatcctacattttgggttgcctacttgcctctgttgttgattcggggttcatgttcaccgtggaggaatattatgtcatgcagatgatatgattatgagacttaattttgtactttcatttgaagcctgatagttctgcgcgtgtttgaaggatttttcggaatgctgtttgctgttgcattggcatcattgcatcatttctgtgtgtagtcattgcattgagaaaagaatgactcaaaaacatctagtgtcattgactcattgtacagtggacatatccatggaccatcacatattcgcatgagctgcggctttaacagataagctaataacttaatgttcgcagggacactgttgtgaaatacagcgacagcatgaaagatctcgctcaaaaattgctgcgcattgtctctgaaagtctgaacttgccaccttcgtatatagaagaagcagtgggggaagtttatcagaatattactgttagctactattctccttgcccacaacctgatcttgctcttggattgcaatctcattctgatatgggtgcaataacacttctaatacaagatgatgtgggtgggcttgaagtactgaaggacgggctgtggatacctgttccttctttgcctgatggaatccttgtaattttggctgaccagacagaggtaatattccttcacatgctttaatatatgctataccttctaatgctatctaatgtgtaatcaatatgctccaaactaccaaaatacattttgctactccagatgattttattcaagtattatttttatggtacaaattatctgttaggtaatttttgactctttaagtagtattaatctggcatttgcaattcattttagtttcattgcgaacttaagataagaatatggtcctgtgatacttgttcttgctactcatcctgcttgtattgtttcgaatagcttgtttactgttgtattccgagtagctgctaccaatgcgttctttccatataatttggctcctgcaatccaaatgctactaatgtttgcctttctctagatcataaccaatggaagatacaagagtgctgtgcatcgagctattgtcaatgctgatcgtgcccgcttgtcagtagcaacattctacgatccatccaaatctcgaaaaatttgtactgctccacagctcgtttgcaaggagcatccacagaagtaccgggatgtgatatatggtgactatgtctcatcttggtatagcaaaggcccagagggcaagcgcaacattgatgccctcctgatcgagcaatagaaccagaggcagcattatatagacagaatagagacattcatgcgtgttgtgatgctgtccaagattgccgatcttgattaataaagagaataacattgtaccatatgaatggttcctggtttttgaagtttctatgattcttatcaatacttcccttgaagcaaagctcacaattgtgatttctgaccaactgaccatcatattacaacatgacatgaacataggaaagaggaaaagatactgattcttaacatctatttcttgctaatatgatcatgctgtggagtaattcccagcttcctggagcctcacctccagtagctaagtttgtggtagtgggagtattgcactggtagctggtcagctggcggtagtatgtttcttcttgggatcagtgccattatgctgcagcctctcaggactctggaatcaccagtcaccaacagcatcaagctcctaagttcatcgctgaggtagtactgcactcatgcttatttctaataatgtaaatacttcttacacttcattgatgtgttgttataagttctatagcatatacgatcacttgtagaaaaaatttccatgaaacccatatggaactctttgaggtaaagtgattttcaataccggttcttctgcaaatctctttgcatcaataatgtaaacctacaaaaatgatgttcaataattaaggatatgcatggaaaacagggtgaagtcatgtcatgtgcttcctttaccagtaaatcatctaatgaggtttaaatacctgagacacattagttaattcatcatggacatatgttattatccatccatcatcttcatctattccattttcctttgcaacaaactgaactccagagcagaaggttttctcttttaaaacgtggtactccactgatttcagttgtttgttttcctgcggttgttctgaaacttcagtccaagtaaagtcatagacaaaaaacagttgatacttgtgcagtattttctgaccttatcttgcctgtcgaagtgtacctttgctatcctattatacttgaataaacctgcagcattacacacaatcgtacatattcagtatatgaagattgcatgagtaacttaaaatgaacaagcacatactgtaacaagacatgacataagcaattaaactgtcgagaacaattatatatataagtctcttttagtctttctgcaacttcactggtaggcaattacctatttcactggttgctactgagtcaacaacctgtgcatatccgtagttgtttttgaccccaacaaagtcttcattgataacaggaaaatccattgcaactttctcatctgtaagataaccttcttttgtagttccgcttttcaagtttagcctccattcatatggacgagaaaagagagtgccatctactgatggatcaaaaccttctgaattcttatctggctggagaaatgctcttccagaacattttgacttgtcgtcatcatgacttgcactagagagtaccgaatcaagtgttcgacaacctctgataacaacctgtttacaggcttttgccaatgagtataaatagacggaaaaaagcatcgctaatctatattttctatgagattatcctcatgtatgtgacataaacccttttatgttgggaaaattagaatgtttgaaccacaagaattacacggaaaaattgttctattagattgattttctgattttgtttctgtactctaaatgcatctatggtaaattaatgattacataactaggtccatctgaagtttctataagcgtaatatcgataggatttttggatctcgtgtgataatttaatacatgaatactgattttgtaaaggttctagcgaaaatactggaaaaatagccaaataggcagtccatagctaagtaaagctaggtagttagcatgttgcacactacaattttgattcataaggcaaaactacagcagaatataaagctttttctggataacagctaatcatatctatatatttctctggacaaaaataataagaccatcaattgaaatagcagaaagattaatccagaatgtgtattatagttgcctacagatttttttaaaaaacgatttcagtatggtgaacatatatacaagtgcagctacatgcctcatgcaccagatccactcatcccacctctagtatgaaattatcagtagtgttataaaaaaaaagaagcaatgtctgttctgaacctccaatgaccattaaagctgtttcatgatccttaattttatcttttgttaaaattgaacaatcacctcatttccatcctcaaagcaattaaataaatggtaactgcaatgattctccacatcaaaccagatgatggaatcagcatcaccaaacctaggcatcactccaatgcgtgatatcccgcccatatcattttggatgaatctgaagagaaacataaccacattattatggattattaagtcagtatgcatatttcccacagaagtggttgtcatagtaaagatggtgtatatgtatgggacccacggtttgcgtaaaattgtccttattaagccgaagtggagaggatagtccattataatattgtacctacaatataataattagtagttacaagaaaacgtattgttgacagcaatataagatctcataaataaaagctagcatactgtgcagttactccgatgtcatgaatgagttttccttcctcgaatttgagatcgaccttgtgaagaagcctctcaccatcagctagttcatgtgaaagaacatcacttaataatattgtaataaaatctaaaagatcatttttgcccacaataatagcaagcaagacacgtgtgtggttgagaaatttatattggttcttttgatacaatgtttgttgatatttctaatcttatctagctgtctttttttttcatgtaactattgccagttactatagtaatattgtgttccgtttacactttatttttattacttatatgccactcgataatttgcaaaaccccagcctggacaggcgctatcaaacaaggttcaacatggtggatctgagtgcatgtgctagttaaaaatacgagttgcatataacaaatgctacaaaaggttggtgtaatatactctccctgacccaaaatgtaagggattttgggatagagggggtagcccattttcatgtattgttttacacttgtctagtgattgcatttatgttccaccaaatcacaacttacaggaaattactccaagcacatagtggggtttttcaatattagttcccatcgtcacgagttctccacttccacaaatcttctgtaaataaaatcatatgcatgtaagcccttgctatagatgaatgatgctgctcacaacagaacattatgaacaatttgagtaactttagttggcattaaaaatattccaagaacattatgtgtttgaactttgagttgatgatccatgcttcagtaatcattcaccatgtgaatttgtgaagttaagaaatggtggctgatggattaattgatgaaagatctctactgaaaattattgaataataatattaatatatcactggccttgcctactgttcatactaaaacatcaaacacacatttaaagaaataatgagcaagctgtaattgcataatagaatacctttgggtggctagtgaaaggttggtcccaagctccattaatgttgtaaggtcctagggtgcggagattattgatgtcaatttcgtaaggtagatgattttctgtggcagcaaaagctcgtccagcatgctgaaatatggaagtatttgcactgtccttcacaggctttccaaatctcacctataaatatcaccgaagatgatatgtagtgttaaccatcctcaagaccaagtttaaacaaaaaaatcatgtgcatctgacaattatatagctactcaaattccatgagaaaatgattcaacagcggcattcagctttttccactggagaaacaactaatttgttgagtttcagatattatgtaaatctattccactggagaacagtggaatttttacatctttctcatgtcgattcttcttgtattgaaataagaatatttttttactatgcagaaaaagactgtttcttatttatttgggtatgtatattggactgccttttcttatgcaatgcttatgtcacatccagtagttaatctgttctagatattgatttaacctgcacatcatattttcgccgtgcatctgcacatcatattagagctcaattatcctatccacctagtgtttacacttgatctaatactaaactatttaaaattaggaagacttacggtattaagaagaaaagcaaccagtgttgcacatggctcgccttcagcagatggaaggaaagctattttgttcttctttctctctaattcaaaagtgtctgtgtccacatatttgttcttgtacgaaatcctccattctcctaaattgctcttgctaaggtagatagcatgcaacattccatgtccttcataatacatgtatgatgttgggccaaagatggactctgcagctgtctgtgatgcattaagagggtttggacctgttcaaatagatcaatgttacacgtgcatagaagtttagcataaatctgattcattattaactttttttggttggaaagatgtatataagcttgtgagcctggaagtatcagaactcaccatttcttatatagacaccctcaggaaaatcttttggaacctctccattgagatcgtcaatgaaaacctcatcaccaatttcgtttacaggtccaaaattcccctgtagaagactcagatgaaaattatgccaaattgatgagtcagataaattggatactacaaaggagatggaaaaaaaaagttgctcgtcgacttcacaaatttgatgctgaacaatgtcatgtttgcaaattatatagtagcacatgcatacattaacaatctttatatttacctcattcagataaggctgctcagaaaacttgtacacggagtcgatgaatcggtccagcagatctgaagagactgatttcagagcttttgtcaattcctgcatcagtggctgcttattccacccagtaactgaagattgcacctgaaggatggtacattttgaggtaacctatcccttcttatattgcacaaaatattgacttaagaaaaacaaacgcagagatctgaaggtcctattgaggtagatgtagctttatctcaactgaagaacacaaatttgttacaacacattgaaaagtttctttgttttttttcttgggagaacttacaacacgtttcaaagttagtacttgaactgcttgctggatacatgtaggcaggcatgttccatccattggtttgtctggagacatcaagttaataaatcattattatttccagattagttaccttgacggcattaggtggagacaatgaggaagcttgatcagctgggctcttccctagatgaatgcatctagtgacctgggagctgcaccctccagctctgaacatggcttgctcaggttattcgatcctctcttgtcagttgtaaactgttactggatgttatgcctgctagttcgagcttgttgcattataaagtggaggagcagtaagccagtaaggcatgcaagaacacagacaaatatggtttatcccttgctatgcatcggccatggggaggaataaaatggtctgattggttcagactagcttaagagcaaacactacagtagataaggagcatattcttgatggtctgtgggtgcaataagacagggttaattaatcaagaacaagttgattaatatatggtcgcagaaatcagtctggaatcagctcaacaagggatgcaagtgcaactaggactgatttagtcatgtagtgatgtagatcgtgatttgtgacctgcgacctttgtgattgatttgctgctgggttggcagctctgtccgtgctatgagctcgtgaatggaaggaacaccagtggcgaatcacaatgacgctcatcaggtcaatgtctttttttgatgtaaaatcaggacatgttaatcacgatgatgctcatcaggtccatttcttttttaaaaagtaaaatctggacaagttaatcaccacaccgctcattaggtcaatttctttttttaaagtaaaatcaggacaagttgtaccacatggaatttcattacggaagtagttcaaattaggctggcttttttgttgtctaatcactcttgttgatatgtactccttccgtatttaaacatgtcattgttgattttattagtttgtggaaatataaaaatcgtatgggtccatttttccttataattttgttagatactatcgttatatttaaatacgaaggtagtggcataattgcagtgtaaaccccccaaaaaactgaagagatgcaggttttttgtacttagcattcgcaaatacagtaagagtttggttttgttcgtacatacatgcacgtatatacaagttcacaagaacagcagtcaaatgtggaccatgcgcaatggacgatgggttccaacttccaaatcttagtcgggccgttgcttcaccatgtgggctaaagatgccacgcgaccaaagcccaccaccacaagtggaccaaaagcccacataaaccgagggtaattggaccgacccaacctgggcttcccacatgggcttaaacttattcgcgccttctccttaccaggcagcccatcagaataggccagccgcgtacattcccaatgctcagagagatggactattattacgcatcatcaaaatgttaaacgaccactttcaaaagaaaaaaaaaagagcattgtacttgtacgaacacatataccttcgttgcaatcacaaattcgcaatcaaaagatccaagttcatcacatggccaactgcgcgagagatgacacaacacggctgaaccgctaaaaaaccgctacgaaaatgttttaggatcatctgtgcattcttctctgtttaaggttggtaacagagcatgcagtgctaccttcgtctcgggctcgtggcacgaaccgccaaaaatcgacggcgatatcaacctcgttttgtttgtgaaacttgtatgtccgtggtaggttgtagcggagctggaacagagggaaatacagattatcatagcaggaacaaaactggaaacagaaaacatatgttttgacccgtaaagccttaaatgtagaataaactcatctagaaaccaatcaactttttgccggatttcaagcaaaactagaattgctagtcaagtgttatatcccggtatttcaaataatataaagaaaacaggtgcaaaaatggtttaaaaaatcataggtagctcaatatcgcatttcaccattctatttgcccagatttcctacagctagcaggcactgaatacatttggtcctccaaactttactcatacccaaatgtctgattcagtctaaatggaagcaagaaaacaaaaaaaaaattaacaggataatttatttactacttccccattgaaatactgaacaacatttttagggggtagatgcacaatacaaaatgataagcgcctagcatctatttagttacctcacatagaacctcggcacttatggcattgcagttgcgcaaggctaccttcttgatgtgctaaagatcagacacaaaaaaggtggacaaaaaatcaattaataaaacttccatgctaactacaagatggaacattgataaatatggttacttcttgttggaaatacactgttgcaaatagagaagggaataatcaaacatttatcatcagaatctaataaaataaaagagagattgtttctgacatttgtaatccccttgaggaacacttacttctctggtagaagtcttgtgtagcgaatagacagctcgagtggcaacctgcaaatagcaatagatattaaaaattttaaacatcatgcaataatctcagtcatgtgtatgatggcaactgctgcccagtgccctcaccttcatgcccatagaaatgaattccatgtcagctccttttctgcttgtcccaaagggaggattcatgacaacagtgtcaacaagaaggcctacttcaacaggtagctaaaagatcagggaagcttttcaatgttgaaagcatctacgcttatgtgtataaatatatgattttgtttcaataaccattcacattttttttgtgacactatattatctttcttgacctgaacaatggtgcacaggctattgaagtactggagagaaagtaaatagctgactcgtatagtagcatcagctaggatactactctggatatcttctctaggtgctatctacttatgtatgaaataacaaataaataacatgcaacagaaaaaaacagtgtgaaaaaaaaactatgagaagatcagaagcaataggttatatagaaaaataattaaaaaaaaaactgaactaaaggtgcacttaaactaggtagagtatgtcatcatttaaggacaatacctctcaaatttaaattctttatatcacactgaattaagtcgatatccagctgcacatcaaacatttaacaaaagaaacatgtcattcacatagtcaagtattgttactgatcctagaaataactatccctgtgtccaaaaatatagctgtttatggctactatattttgggacagagggagtgatacattaaatctgagtctctgctttcagccctactttgccaacatttgcttagccatgcaaatttgaccactaatactaaagaacatgaatagagacagagacagtaaaacctatatttaaaaggataatctagacagattagtagatcaattgaacagaacaaaattattgcatctttacaaaagaagggaagcatactaagccatttatgaaatttctatgatgcattgataaaaataatccatggcagtagtacatataaagaaatgcaaactgcaatatttgaatataaaaaacatctcagatgtggagaactgaaaacaaaaatcaacacctgtagtgcatttcagtagttgcagaaagctgatttaagcatacaactttccacaatgctatttggcaggaagacgccattaacaatttgcactacatacagatgagaactatcagaaaattatgactacaataacatgcatagtttggtggtgatgcaaggaggatgctggaaaaaggtgaaaacgagagggtacatagacaatgtgaagatttttcaacttcaggctaaaccaatggttatattcggaaccaaaaaaatgctatacctctagatctgcagcattttcttgagcaagttcaagggattgcgggtcaatatcaattccaacaacatgcctgtgatttcacaaccaaagggacataagattagaaattgtaactgaacaaataacaacaaaaggcataaagatactgagtgatgaacctcattttcttgtttctaatactaatcgacgagcacttaagttctgtaactaatgtggtgagcaagtggctaggtgaactaatgtggtgatttactgtccactaagttctgtaactgatggtatatcaacacacaagcatcatggacagatatacttattaggtaaagcttaaacaagggtaaaacatatccagacagcacaatcagtcaccatacagttctccattttagatacaaccattctccattttaggtcagtgagtgttaatatgcgacaatgtcacatgatgttcagtcgaattgaatataaaagggcaacacctttgcacagttaacaaatgatatctttacaaatatcaacacagaagaaaccagttggtcaaaagaaagaaaacccaaggatgtgggtgtccaaatcttaagatcttaaacatactcactcagcatccagcagagagcttgccacagacagggtgccacacccgcagccaaagtcagccaccactttgccagttatgtcatcaaaactattctccgcctgatggatttatggaatcactatgagcgagataaaaagcacaccagaacaacttgaatgttagcatctgaacagcgcacatgccagccatctactatttgtcaacttgatactgacaaaccacaaaagtagacattgccaacggttgcaacctgcaaatataggtgatctgccgaaacaccagaacctccaaagtatctacttcgatggacatcgccaaagtttacactcgatgatggcttatcaaaactaaaggctcgaaagaccaactacatgaataacaactattctaagaatttcaaagcactaagaagtctgaaatcgctacatgcctagaggaagagccactctactcttagccatgaacctactactgctggtatgctgcttggtcggtttggacatggaaccaaagctgctgcacttgacgtcgcccaattccactcacatcacaaaaggaagaaaaaaaacagcaggatcgtattcgaagaccaaagcaaaagataaaaaaaaatctacactctagtataaagcacaaaatcaaagcaggaaactacacggggaatcggaacaggatgctactactaccgtgtagagcatccgcgacgcgatgtgagggcccgttgcatactgctccagctccacctgcacccaccgaccaccaccaccaccggcggcggcggcagaaaaggtcagacatattcccgccaccactttgggcggcgatgcgaatcggaagacaagacgccggcaaagtgagtgcgcggcggcggtaaatttaccttgggtgcggtgaactgctgcaggtctccgaggagaccctccagctgcttcagcttcatctcctcctcccctcgccgccgccgccgccgtcgtcgtcgccgtggaagatggagctctctctctctctcccccactgccgggccggaggctttgccttttttcttagggccggcgcgggtgggaccgggagattgggccccatatggcccatctctaatgggccccgctacattgattgggccacgttgggtcttgggccggataggaaggcctaatacgagtgagtgggcctattacatcatggtcctcgtggataattgggccgataaaatgggccgcgtgggcggtggagtcgaaacgtcccgccgccgccgcggccgtcgactgcgccggcgaactccgcgttctccggatgcgccgcgccgcggggtgggggattttttgcgacgtggagttcgcgccgcgcgacgccggaggtgagtgctccgcccaccgtcgtgctctcctccgtttcgaactggcaattgataagctttgatgtctaggtttcggacggcttatgaagttgctgaactgggatgcgaccattttttttctccgattgaattttgaagcaattcagtgcaaaggtaaatggcagggatttgcaatttgagatgctaatcttttgtccctgcaaggtgaatttcgcaacatttctgtgcaaggtagtggcatgaatttgcaatttgatagactaatatgtgtccctgcgaaagttgaatagttgaaacaattttgtgcaagctgttggatatgctttggatcggtttggcacaaagtggaaccacaaattaaaataggtttggatcataccttgatctcccggagttcccatttctctgttgtttgttcttctttcttttcctcttgtttggaagcacagagaggagagagatgtgctatggctcttccctgtgttctcagtgggttgctagatcgggtagcgagagaaatctcttagggtttaatacttaggtgttgatttctatttatagccactgcacacagggggaaccgacactagtggaggcggtaaatcccccgatcagggactttcttgaaggggcgatcactgtagcgattgccctaaaaaatctttcttgccgactttggtttagccgcaagatcacatttgtgttcacagtaacacaagctagtgccatgaatttgcaatttgatagattaatctgttgtccttatcgaagtgtcaatttaagttttgaatggtttctttacctcaaaaaaaaaaaagtttataatggtttcatttacattcagtaccttggtagtacctggcaatattattggtcattgctcaagataagtgttgaaacatgatcatgtataggcttgattactgaccggatatataggtttcttggtctcatttcacaagtctttgcacaccttaattgagacgtttagtatatctgcatcacatggcatgtaatccagtcttactcacgactaccatgttgcaatgggtgggtatgccacgttttgggagtaatgcatgcttaattctctcttgcatgaagtaatctattaatgaaaccaaatgaggcgccttaactcgccaattaatggaaacattaaactctatttagtcgtggtgtttaagtttaagggccaatacgttcttgtctagatatattatgacatgttatgcctgtgtctcctcccctgaaagatgcaggcaaagaggggccatatttttcaatctctctccccaccccctgacttgagcttctgaaatccaccatggatttcagttgcttgcagccacattcaggaggttgtgatgatatgccatttgattcctatgtgcagcaaaatggccatcaggagctccatcttgttgatcatccattcaacaatgtcactgacggccatgaatactattctccatctgctggtggatcttttcttccctttgcaacctactatgatcttggccatgagtactaccctcaaggaggagaaaaggatgctgtcgtcgtcgatcgggcttcgccgactattcgtaaagcttcgcctcacctgcctctcttcacacctaaatctgaggtttctcatctcataggaggcggtgtcgttggatcatataaggcatttgagatgaattctaggcttatccggcgcaaaagggcttcgggtaagtctctgaagaaggctaatgttgtcaaaggccagtggacattggaagaagacaggtaaactaaactaaatttgtccatgcatgttctgtttaatttaacctctgtatgtccacctaaaggagttcatggttagtaggacataggattgttcatgttctccctagtaattgacaaatgtaaatgaattgattcttgcgaaatttaaacaggaagcttgtgaaattagtcgaacagtttggactaaggaagtggtctcacattgctcaaattcttcctggaagagttggcaaacagtgcagagaaagatggcacaaccatttgaggcctaacatcaaggtactctgtgctcctacattttgtttgtccaagtactgtttcttaatttgaaaaggatataatactgtctatttcgatgctttcagtgcacagaaaagaaaatgttcttgtgaataatgcccctgcatttcaatgttgttcgatatttccttgttttacttattgcttgtttgaacgaaattcctcaagaaaagccaattttgatacattcatatcaatgctaataaactccccaatacatttattctcccttcacaaccttgagataaactccccaatagaatactgtctattttgaaggtcacggaatctgaacgcaatgtgtaaagtaaatgtttgaagctagtcaaagattaaaaactggtctaagagagagcattgaatattgatttgaatacatttaaatcaatcctaataaaaaaattgaccttaaactatccctaaatattttcctatatagcattcgatcattttgattagcccaacattcacaagtgctcaaggacagtttcttcttgataagcagggagccaggataaggtggtgttctaaatagaaaggaagccacagaaattaggaacaaaaacgcttaggaagcatcacagtagatgagaattagaaaagctaaatatcattttgcaactgttaatatcaaggagaaaccaataaatctataagaacggatattcataaaaaaaattggcatgttcctttttaaaaataaaaactgacatgttagttttcatgacaatcacactttttatagagtttccatgcttggaataatccttctgtgtaacaaaaaaaaatgcagaaagatacatggagtgaagaggaagacatagttctaatccaaacacacaaagaagtgggcaacaaatgggcagagatagctaagcacctgcctggtagaacagaaaactccatcaagaatcactggaatgcaacaaagagaaggcaattcgcacggaggaggagccgcgctagctccaagaaccccaaatctggaacccttctgcaaaactacatcaagagccttggaattggtccaatcaagtcaagtgttcgtcaagctccaccagaatctactgcagtgtcatcgtcttcaccagcatccacacaaaagttagcagaggtgaatggtaagatcaggccagattccaacccatccaaccaaatggtcacccagggaatactcaccatggatgagaacagctacatccagaccaactcttgtgaagaactcctggtctctacctatgatgatttatgccttgatatgtgtgatcatttgttcgaaacgaaggacgagatgccgtaccaggtttacaacatagatgatgatgttgacatgaactacatcttcaaccacattgattatgctaacaagattggccatgagatagatatggaaatggcatgggacgatgatgtcctccaagacgatgaatcagctggatcatcaccattggagacaccggcaggtctagcacaaatcaataccgtgcatgtgaaggaggagatggatctaattgagatggtcacacgcacacaatcttgtggctagtggatgagaaaataagcagtgatgtaactatgtgtgctactaaatacacattacacgacctttcggagtgcaacctggggaacctatatggtgaagaaatattagaaaaataagaaaaacaaacatgtatgggttcgaacgaagcacttgattatatattatattgtaactaatattctaagtttttctcttcgtacttttggcatgcactctctctttaataagtactttatttttaccttttcttacattccaatttactcgttttatctactcacacttaattagttcatgctgagaaacaactagtgtggtatactcacatatattgaacacagaccaattaaggtaagaattaggcaacataattataagcatatatctaagctgacatgattagtggtcagttaattgtttacttcgtatttattaattagtaacaaaacatcttcattacatactgaattcagactaacatatagattatgttcttgcagcattcatcaatcaaaccgggatcattcctttgttcagttcaaaagagcataaacaaacgcactaaatttagcacacacacttaaggtaaaacccgcatgtaaaagagagcattacgtcaaacaccacatccaacataggagatgtccattaatgtgataagcaattcattcattggttgaggtgatccatgtaagcttgatacctgcatgggagagggaaatgacgacgaaattaacacatatatttaaaataaaaaaattggaccaatctaggaaggagtagattgattttgaattaaggagggggtgagactcaaacccggaccggctagttcgcagcttgcgttgctagccggaaagaccccgggcctttctccaacaaactccaacataaattaacacatatatttatgttaagtatctaacaaactccaactaaaaagaaaatgctttttaaagttctggacaaagttttagtacacatcatcgttcttcagtccctaacagtacgacgaactactttttttttatcttgccaaatttagttcattaaactctgagttaaacttgaagctagctagtactactaatttataatagtgccttgtctccttttgccccacaatataggaagcgaaacatatgtagctcacattgaactttgattaattagtgaatattgatttagatagttggtcaataacaaattagatcataacttgtatgagctgaagtatacaaattaccctatatgcagggaagggtcacaaattgcatgatggagaaactcttggttagcttcactagcatggccactgggccctacatcttggcaagatatatgaagcatattttctccactagtttcttgtatctgttgcaataaaaaagatttttagttaagctgaaagaactgcaattccctttttaagtatatacacaagcaaccgaaatgattcagatcacttcaatatttaaccatgaatttaagaacattatacatccctttgccttgaaaatttaataatattatttggactagtatattaatatcaaattaacagctatggggattcacagtaccactgaatttgagcaaggccattattaatttgattgcaccgtctatatttctttagataaataacgtgtaaccgagcagcaagggattattatattgctcatgtgagccttcagaacgacagcaatcggaagctagttcgagaaaagagtaattagtttcttaatttattagttggattttctacctcataaatacatttgatgtattaaataatacctctgtcacaaaatataagaatttttagggctggatatgggtattaaggaagtaagaaaattaaatcggaaaatgttgataagataatttagatggagaagttgttatatttggggatggatggagtatatgctaagagaaatttattgttcattcttattgaagctacaaatagtttccctcaaaaaaaattatcacatcttttttctatgtgtttgtacatgtaggatatgactcgatcgtaggcacatggaaattatataacatactcatgctcaaggctagcagctccggagagagagtaatataattaacgtttggagttttatcacatatggagtatatatactaatctgtatatattaccttcctttttaagtctttattagcatcttgaagttgttgttcctgcaaaacttatcagttattatttctggggactagatagtagtcaaaagattaacgaaaacgtacccataaaacaaagacagcacacacatggattaccttacgtttgagctcaaatacttgatcaagcaactgttgattctgtaaaaatgtatatacaaatgatttaccagcaaagtttgatcaagttaaaatttgatgtttcatgtaatacttgcgtaacaaaaccaaaaaaaaaaaacagagcataggtaatatataacatataagatggtgtatatgatgtataaagtactgtgtcaagcgggaatcaagctaaatatgcgtcgaaattaatatgattcatttcactatgtaattacctttgatgacctgatattcatgagggatatctcgatctggttctcaagttgctcgagctccttcaagctaagtggaaccaagtcctcgccaagaagatttctgcataagatcagagttagtccatgtgtgtaacatgtagaaaagctttctgagaagatcccacgtgcatacctctgagttgtttgtaggaactcaactcttgtctttaactttaagtactcttggtaattgctctatatgaatgccaaattagcagccaaatattaattgaaagaaaatcatgattactatgtaaaagttgatgagttggaatatgcctggcatagaactaattaaattggacatgagaaattaattaattaattaatagacaaaacttaaaatggtaatggcatatcatgaagtatatacatactgcatattgctaattgttgtgttagttgacaacagaacttatttgttacttcctccgttttatattataagactttctaacattattcacattcatatagatgttaatgaatgtggacaatgctaaaaagtcttataatatgaaacggagggagtagatatgtagcatgcatgcatggataatacttgtttcgtcctcgatatatacatatatagctgctgttcaaaaggggaatataccctgcgcagaatgtactgtaaaaatgtaatttaaaagacaagtctgtttaaaatatacattaattaacctatcatgtctagcatattatacatctatcatgcacgaacatgagaattatgtaaaattttaagatatcacatacgttttattaaatattatgtatggcagtgtacacatcgatatttccttgtaaacaataattgtagcccctatcacaacgtataccagattgtgttaattacataacttatatccaaaacaagcctgattctcctttattaacagctagcagcagttgctgcacagatagagatgattcattagatctaaaaatatgcttggccacatagatcctcatgtttcaactaatgaccaaattaagttcaattctttgaaaaagtttaaggaaccatagtttattacaggtgaattgcatatgcagcaatcatattcagaatcagatggttactagttcagtttccagtgcagcagatgcttcacatgagttaaggttgtagttgcaactgcggtatcgctccagtgtcttgtacatactgttacaaaaaagaaaatcagtggaccacaaaactattttcaatgcagtatcagttaaagttgttatattatattttgttgtttaaatacatgtatatacaacccgattttcctacatatgcatgatcagtttattttgcctttcataattaatggagcatatatcagttatattttctagggtatgtgcacagcgcaccctaagtttggagccagggttttaaatttcgaaagaaggatttctaccgcaggtgggcgatataaccaaaatttcagatttttttttcgtacgattttttttgaatttttgactgattttgaatggatttgaataaaatttgaccaaattcacaaaaatttgcaaacaaccgaaagtttcgggcgagatatgaacatttcggtgggggcgaaatttcgagccgaaatttcaaaccctgtttggagctataaacactatcacttacaaacatgtatatatttgattgatttgtgttaaattattagaaaattgtactctgtttttttagaaaaaaacaattgtaactaacattcagattttgtttcaaaataagtgcaattctaaaggagtgcagtactatttttccctacaaccacccccctcattcaaattatgatccctattttacccccaaccacaatttcactcccaatcattttacttcttgctaatttgtcttttaaatgctagagttacattattttctttgtggatactggatagaaggagtatattttttggggagggaaaaggagggagtacattgtgactaggagcttggaaaattcaaccaatccaaacttttggtacacaagtactcctactacataccctaacggtagggtagctagtaactgtgccttgtaaatcgacacaacctcgttccagactagctagcctgtactgtgcgctgacagaaaattttggcaatcgacacgcacgcctctcgcacgataagttgtttgcataccatatgacaatgttcaaatgatcaaatcaatctattcgcatcatcgcatgtgaaattatgaatcgcataggagtatgaaattacgaatgcagtgaattaacttgggtgtgtgtccggccacgcctagctagaaatcaattcgatctttcgtaccacacaactacaactaggctgtgtttagttcacaccaaaattagggtccctttgaatcgcaggattgaaaaaacgtaggaataggaaaaacgtaggattttggtaggaatgtaagtgtaaaacagaggattgcaaaacgcaggaaaaacacatgaatgaccgtttgattgaaccgcaggaaaaacgcaggaattagatgagagagatagactcaaaggaaagttagcaagaggttgaagctcttgctaaatttcctccaaaatctctataggattgtccattccataggaatttcaaaggattggataggattcaatcatttgtttcaaagggcttcataggaaatttttctataggattgaaatcctctaaaattcctatgtttttcctccaattcaaaggggcccttagaagtttggttgaaattgaaacgatgtgacgtaaaagttaaaagtttatgtgtgtagaaaagttttgatgtgatgaaaaagttaaaagtttgatgaattattttggatctaaacacggaccgtgtacatatccacagggaggataacaaccgacgagacgatcgatacagagatgcttatctccacgagtactcctacgacttttcctcctgctgctgcattactacttttcctcttgcttctgcagctgcaatcgcatgcacactagtacagccgagacatttgacaagacgtagagagagaaacctagctagagagaaagagagagagactcaatggaacagtggaacccaagaacaacccctatgttgcgagttcccaatggaacagtaaaaccagagcaagaaaccctcccaacttgccattggaaaagatgctcctaattaagatctgacaaaaataacttgccattggaaaaggcactgcagcctagtatatgtgcttgtgcaatatgagaattaagatgcaatatgcgtactagtagtactatatgccatgttcttgtgcagatctggaggggtctcatctacttcactctgaaaattgcatgcactaatgaaagagctagagagacaagcatggaagagatcagcttagagatatctagcatgcagctctagcctacaaatggaagcaagcatggagagattgcatgcttgattctgttgacagagtactagtctctatggcaactgcaaaccgtaaagaggaattaggggacggcaaacacacacagatcggcagccatcaggtgactagaacggctgtcctgtctctctttctttaaccaaaacaacaacaggaacaggttagttaatcagctatgagcatgtatatgatcacgatcgaggtggtaaaaattaactaaaatcaggatctttgagaaagattggtaaaaattccaacaaatacaaacgaaatgctggtatatatatgttttaaacacaaacaaagcagcagggaaaagactgggtgtaagaacttcccggacaaacatgagatgttaattaaacacacggactgatgattaattagaacatggtagctaggtgggcagtagctagcccagaaatcacaaggagcttcaaaaactcataacgagaaaactagtctttcttggctgcaaactaattaactaactttgcattagaattagggcgagatatatatgaattctctgcaaggggcgagagcttgcaagagagaattattagtagtaccaggaggaggtggagaactcgaagaggcggccgcgggtggagaagatgatgagggcgacctcggcgtcgcagagcacggacagctcgtacgccttcttcagcagcccgttcctcctcttcgcgaacgtcacctgccggcttatcttgttctcgatccgcttcagctctactttccctcgccccatcgatctctctctagctctctctcggtctcaaaatctcttcttgatctatctcctctctctccttgcctagctagttagctgcagcctgcaagcttccctctctctccctctcccttgcagtcttgctccgtttgttggggatggatggatcatggatgtagtagctaagtagctcggctagctagccatgctctcgtaccatcggctgtgctggccggagtgctccttgccttcttttctctctctctctctctctctctctctctctctctctctctctctctctctctctctctctctctctctctctctctctctctctctctccccctatgaccaagtcagtcacagtaagttgttagcttaattatcagccgtagctagtaaaatttaagtgtgaaatttaatcttacatttagttttaaagtttttttcaccgtagtctatttgattatcagcattatcctttaaaatgcaagatataaaatttcttaaccattaattaagggctcctttaaaataaatgattgaaaaatggaagatgaaaaaaacaagattttgaagatattggctctgttcggctgcactcattttcattgtgttgcagccaatcgtcacagtgtttttttttgttcagctgcagcagcgcagctgctaaacataaaaaacatagacagattgcaaaagttgcgagcaggtccattgtaattgcgaaagagagaaaaaaaaaacaagaacaaccatttgagtatgtaggccatttgaaaaacgtaggaattgaatgagtgatatagactcattggtaatcttttaaaaggttagagctcttaataactttaattcctccaaagtctctatagcattgtttgttccatatgaatttcaaagaaaatgttaagatttaatcatttattcgaagttatctttaggatttttttttcaataagattaaaaatcctttttttatgttttttcatacaaatagaggccttaattaattttacatgtaggagttattatttccactcaaacgatcggagtatccttgattctttggctacaactacctatatagactcattggtaatcttttaaaaggttagagctcttaataactttaattcctccaaagtctctatagcattgtttgttccatatgaatttcaaagaaaatgttaagatttaatcatttattcgaagttatccttaggattttttttcaataagattaaaaatcctttttttatgttttttcatacaaatagaggccttaattaattttacatgtaggagttattatttccactcaaacgatcggagtatccttgattctttggctacaactacctatatagactcattggtaatcttttaaaaggttagagctcttaataactttaattcctccaaagtctctatagcattgtttgttccatatgaatttcaaagaaaatgttaagatctaatcatttattcgaagttatccttaggattttttttcaataagattaaaaatcctttttttatgttttttcatacaaatagaggccttaattaattttacatgtaggagttattatttccactcaaacgatcggagtatccttgattctttggctacaactacctatatagactcattggtaatcttttaaaaggttagagctcttaataactttaattcctccaaagtctctatagcattgtttgttccatatgaatttcaaagaaaatgttaagatttaatcatttattcgaagttatccttaggattttttttcaataagattaaaaatcctttttttatgttttttcatacaaatagaggccttaattaattttacatgtaggagttattatttccactcaaacgatcggagtatccttgattctttggctacaactacctatatagactcattggtaatcttttaaaaggttagagctcttaataactttaattcctccaaagtctctatagcattgtttgttccatatgaatttcaaagaaaatgttaagatttaatcatttattcgaagttatccttaggattttttttcaataagattaaaaatcctttttttatgttttttcatacaaatagaggccttaattaattttacatgtaggagttattatttccactcaaacgatcggagtatccttgattctttggctacaactacctggaaatggattttgggcgggcccagggatagatgttgggtctcgcgctcggaggtctcaactctgattgcttttctcctttttaaagagaaaaaaatggcccctggtggggcccacgccatgcattgagaaaaggcagcgtgttggcgacgctcgcgattggtcgccggctacctgctcagggctccgtgggacccagcggtcgagcggcccacatgtcagtggcagtggggtaacgtagggggcacgtgtcgacggctcactgggctctcgagtctctgctgggacgatgtggaagatacgttcgcgtcacatcgctgctcgccgttcgtgaaaatccaatcggtattactacagggttttttactttttttttctttttaaaaacttatttgacatgtactctctccgttcctaaataacccaaaccctaacttcccaaggagtttttaggaagagaaacaaaagactacaatgcccttaattaatgtgaataatgttgtattaaatgatgggtaggtgaggggtaagtaggaaagaaggtagaagttggtttattttaaaacaaatttaaactatagaagttgatttattttgggacggatggagtagatcttaaaaaaacttactttagaagtgaatcattttcaccgcgccaacgtcattagtgtcatggtccaacatgccgacaccattcctctctcgggaaaagctaagtcaataatgtaggagtggtaaagttaggacggcgccaacaatattagcgccaagaacttatttgtaaaaattatatttaaaaataggttttatgtgtcggtgttattggtgccgaggatctatttgtaaatattttctattacaaataggtatattttctagaataagttttttcagatgtctatatgtaaaataagttttcagaaaagtccaaagtgcaaagatatatagatattactatctatgtttcaaaatataaaaaaaccatagtatcggatgggatacatccttatagatatgagacctatccacatttattgtattagctaggttatgtccaaccttattttagtttcctatattttaagacggaatgatggcttcaatttatggacattttgatccaaaccccagaaaggaagggagacaagaaacttttgttcttttgcttggcttaactctcccggctagatgaccggttggaaggaagctgaaagacaagaaacttgagtatctgaactgtgtatttgcacgagttaattaattattaacagctaggtagaccaaatgaagtgcagttcagctagctaggcacgcatgtttgtaacaagaattaattgtaatgatatactccgtccgtcccataatataagggattttgagtttttcttgtaacgtttgaccacttgtcttatttaaaaaattttgaaattattaattattttatttgtgagttactttattatctacagtactttaaacacaacttttcgttttttatatttgcaaaaaaaaatttgaataagacgagtggtcaaacgttgcaagcaaaaactgaaaatcccttatattgtgggacggagggagtagatcgatgcacgtctggtgtcattttatgtgttcattctgggaacatatatgatttcacatgtctgccattgaactcgcggttaggaataaccgaataaatcaataaatatttagtgaatacacaatataaaaaagaagtatatataggaccattttgtctttattaaaaaatgtgccctatcaaatatttatagcttcgaataagtaaacatgcatatttggattggagccaaatcattgtaactatactcaagcgcgacatttcaccaactcaatccagttagatttggcacactgcaatccaaacaaattaagaattctacctatgctaccaaataatatatatgtgacgccaaaccttacgaatgttccaaaggcactgtaaaaaaattggtacggtggaaaattgaaatggcttactgttacttttatggatgatgtacatatataaacgatctatacctctttcattacaaacttattttttctgattatattaaagaggtgtactacgtgcacaaattataataagggctgtgtttagatccaaacttcaaactttttccatcacatcaacctgtcatatacacacaacttttcagtcacatcgtactaatttcaacctaaatttttaactttaaaaggaactaaacacagccaacaagatagtgtagtatgtttgaaaatgccagtaaaagtagatgagttggagtagggatatagagcccgatggtacgtagctccatattgcaactacttctatctggcccccactgtttcatgtgctgcctacatacagttaataaagccggcttggccatgttgccattgcatgcgagagatgtgccccggccggcagatatagctacagtagctcctttgcccgacgcggacgcgatgcgacggctttgctgctgacgccacgcacctgacctgacctgacccatggccctagtgcggaccacgtgtcgacccctctgtggcccagcgaaaccatgccatgccatgctactgcccagcgcctgagtcacctggccccggacaagccggagggactcccccctctagatgcaagccagccgacccgccaaactagttagatcagaggattgaaaaacgtaaaaaaattatagaaatgattatttaattggtacaaaggaaaaacataggaatgttgagtattaagttaatagcaatcaaaatttgaataagtaagatcttatcttccaatagtgtcttgcctcgatcctacgcataggaaaagaaaaatgagctcaaggtggatgttaattttcctatgaaattcccttgaaatcatggtcataggaaatttttccatgcttttcctatgttcaattcctacaaatcaaaggcatgaacaataccaaatcccataggattcttattcctatgtttttcctctattttattctatgaatcaaatgaggccttatatgttaaataaatggtaatccgtgaattttcgaatcatgtgctatacctagaaatgccaatgtgtcaatacataaacttatttataaatcaaattagtaggtaacgtggttactgattaattttacctataaacaggttcatgggttgactcgcttacatccctactcccctccccgcgagggtagatacatgttagtccgagtcatccgacctaattaagcatgccctgcactctaataaggtgtttttttttctctcgcaaagttactaacaaactttgattccgaatcatagacttgttgcactgtaagctggatgtataaatgttcggtatatagatttctactctttccgtcttaaaatgagttaacttttttacacgaaacggttatcggaagttgatttattttaagaagagcagaaagaaaaaggaatgtgacgccaaagaaagaaaaccatacggcatttgcacaagtccattgcttcatcacttgcctgtaggcgctgcgactagtaggaccagggttttccataccgacaggcggcagtgtcacccctcctcacggccagtaagcctgttaccaagcaaaaccaaatactccgtccgtttcaggttataaaatgtgttgactttgatcaaaattaaagtattttaaatttaactaaatttatagacaaatatagtaatatttgcgttaacaaattagttttactaaattaataataaatatatttttataataattttatcttgaataaaaaatattactattttttctataaacttgatcaaacttgaataagtttgactttgatcaaagtcaaaatatcttataacctgaaacggagacggagggagtaatatttatcaaaagcatcaatttttaaactttgtcgatatagcgagtaggtgttgttacccaactttagcagtaaacccgattattgtttggggcatgctgtgcttgagatgaaggtcccagtgtcgattcgcagctcgtacacggcgtgcttcattttctttcatccatgaacacgaatcttgaagactgaagtcatgcataccaccgtgcacaaaggaaaaggtttttttgctactaattagatacttgggtcagtcgaaggcatttgttaagtcagtaggcaattatacttagtttaatttacactgttaagccaggtcaggcttctccgagtccgagaggaacatatgcctccattcctgcatgaccttgtcttcaaacatgctgtacactaacagagaactatctgaaactgaggaattgaaaaatgcaggaacggcaaattatctgaaacgaaatgcaaaaattgtgcaagacaaaggatcgagagaaagagcgaagctgcacagttgcacttgcacactttgcaatgaacttctggaataaatcttaacacagcctttaaacccaagtctgaaatcactacaaaagcataggaaagaaagtgatttctacaagattttcttctattcccatttgtgcagcccaaaaggcatatcataatcgaaaaaaaagttcccagaattcatctgctgaaaattccttcaaagctcctttggtccacctacaagtatcaaactggcccactgggcaccagcctgctcctgaatacctgaaccaataaccatcaatccatcatccaatttgcagcacccagctggtccatacatgcatgctggtatccgacaaaaggaaacatgtgctaaaatccaggtagtgaaaactgtgcatgaagctggacaagcagctagcatcatcatcgatcatcattcatcaatgcttaggtacgtcgtcctttcctttgcaacagaagacctgtcgccttgtgatcaagcaagtgtacatgaggcccctaccttacgacgacgatggatccaaccctcaaatcataaaagaggtaggagtaccttcactcaactacttctcctgatctgaaataaattcgttttagatttgtataataaaataaataaaatattgtcttttttcattcttcatagaaatgaaagctaaaatataccacttctgttgtaaaaaaagatgtcgtcttggagatgacacagttgcacatgtatgatactttctcagactgtatatttattaaaaaaaactaaaagagtaaatatattaaaaatacaacaagatagaattttcatgagaaatctgctaagataagtcccgcgttcccctaaaaagtgtaagtttcacatttttaaaccctgccatttctgtatatatattagtgatataagatttcaaaggtttcacgacatgcattctaggacatcatccatttgagaacagaaatagtttcaggctttcagctatgtttcctcattaactctttgacattttagataaactggccgatacacacaatcaaactcatggcactggcaagctggtatgaacataatcaaacttggataagattaagttcaaaggcagaagaacgcatgggatgcccttaggagtgataggcataccgacatagagcttttgtccttgctatccaagttaacaggttttacccaacactgcctttacattacatgctactacgaaatacatacctgaataaagaaggcataccgaaattgcatcagaaggggggatgtccgaatttacccaaatactatacagttgccaattggtaccacttgctcacttgcttcacacatggagggcagttggctacagcgacatgctgtgctgctggagccactcctgaatagcagaacgcagtgcgcgattcggaatgagctcctcatgttcaagtagcaagttggtcattggagacgtgtcatggccattgcagagccaactcctgattgcctcagcttcataggtgaatccatctgctgcaatgtgaggatcatccatgatatcctgaaattgtgaccatggtaggtaataaggtgatgatcagtcatcaagcaaaaactagaaggcagcatttttcagcaaaacaaaagaagtaacacatttggtttttaccatagatttgcacttcttcagtattattttctagctattccattcacatgtgccagaacaaggggaaaaatctggtgattgttttctacttacctgagatataggacagatgaaatatgacggtggactgttttgatcctgtgctgatctagaggatgaaggtgaagataatgcagcatcccttatagcctcaactattgcccacacctcacctgaaagatcagggcggcacctcctgcttaactcagtgcatctgagagcaaggtatgccagctgctcgatgtgcagatgaggccactctcccactgaggtatcaattactgagttcaagtcacctttctccattgcatcctccacgatattctttataccaacaggaggctttcctgttaaaagacgcaagactacaataccaaatgaataaacatcagactgaggtgtcaactctccagtggaaagaaattctgggtccatgtacagaggggtgcccacaggatgcatggtgcggtacagggtggtgttattggtgctggactggattaggaggcgagaaataccaaagtcactaagcttactgactaagttaacaccaaggagaatgttagcaggcttgagatctccatgaacaactgggtgaggtttattcttatgcagaaagattagtgctgaacatatctcagcaataattcgaatccgagcctgccacgtcagagtttgcctcttatctgaacacataagaaaatcttctaggcttccatttggcaggaactcgtatacgagtgttgaagactctgagcaagctcctaagagagtcacaaggtgagggtgtctcactctactgaggatagaaacctgcaagagaatccaaaagaagccactcaatttctacttctcattttgaactagagaggagccagagatcaactcccttttccagaatgacaaagataacaaacaaattttaaaagggtacactaattacctcttgttcgaactgtgattgtccctgtaaactatcaggtctcagcacctttattgcaactgtcatgttccggaggatacctttgtatacgcagccaaacccaccttctccaatcttcaatgaattactaaaattttctgttgcagattccacttcagatgatgaaaattcacagtgcatcgctgtaaccaaaactgaaagcatctgtcctcttttctgacgtagttcttcaacctctcgaactgcattatctcgttcacgtagcaattggtcatgctcagatagaagccattcaaaatgctctctggagtctgagagttgacctagtagattctcattctgctcattgactctctgaagttccacggtgacctcatcttgctgtattttaagttgttcaaactcttgttgtacccttgaaagagattcctctgtttctttcctttgttggacctggcttaaatacaaatcttccaatgtcctggcctgcacaaatcaagtagctgtcattcgtatcatttagacagataccttgatttatgacttcattcaatagcttgtgacatcctggattttttttttaaggaaaaaactgttactgaaaagtactttcatatggcaagtgctggtttgaatgcagagattgggatttggcaaattggtagtagtagatacagtggcaatgatctgctcaagcttgcctatttcttggaattgtagcagcaccaacattagatgtgaatgttgttttgcactctatagaatcaaatggtccacaacaagaaatgattggatgatgatacctctccggtcaagctaacctttttgcaaagataatcataataatgcactggctgtttagagaaaccgtaatgaatttaccaatcgttcagattcaatccgctttaagcgctcgtcggatgcttccttcttcaacaccgcagcttcatccatgcttttttgaagtttattacacagatcatcattcaaatgcaaatctccctgcaaggatcatttataagataatataatttaatagctagcagggttttgatgagcaatgcattagcatcacagaacttatttgtcagttttcactcataaagctacttcctaagcttaattatgcttgagcacggtgctagtcaagttccagaatccagatttgtaacaggtaatcatggatgacttgtttaaaaaaaagtaactaaactgaccagtatctctctcaagtcctctgctctagaatcaccgccattagctcttttaatgcatgctgcacatctacattgaccaaacacataagttacttgaaataataataacagcatcactgatgatagcattggactgaaaagggctacctccttaagccatcaagaacttcgaggttgtttgggtcacacttcaaaccctctacataagttgccagagcaatttcataattgcccataagtaactgaactttagctttacgcagatagcctttcagaaaagtaggatccaacgctatgcatttatctgcatcttcaagaccttcaggcaatgctcctaggtagatgtggcattgggctctgttgctaaaaacctgggcaatcatcagtcattaaaaggtataaaaatatcagtaccaaaactaaaaaggggcagcttgagatatagttttcactaagggaaaaaaaaaagcattaacttgttatacaaccagtgtaatagtgtaaatcaataccctgggatcttttgggttctttttcatggcttcagtatagtgcattgctgcttcctggtaccttttctgcttgaagaaatcgttgcctgcaacatgtgtacacagtgagaagaagcatacgtacattacaattgcatgacatacctagtgtattacaaactaggagctggttattatataatggttgaagaaaagggacccctatccaatttattgtgttactgcacttccattcatgaacaaccataacattttttccgcacttctctgagtctccaactcacaactgaagttagaattaaaactattgagagtgatattctactttaatagtatgctttcttcttgcaaatttgaagtttactcatggaatctcctagaactccagcctagagtacttgacagttgacactcaacggcgatgctttggagcaatatctgataatacagcatacagtcaacgaggtgctaggcaagggaagttagctggacacctaccttgtacaaggctacttctacactctttgcttttaataatggataggtagtgctcctgccaaattatttatttaaaaatgggtaaggatcctacatgaacaggaatagcatgtaacaaatgtgtatctgttccaattgagtggcaaattgacaattgaaacaacaccaacagcattagatgatcggtgcacagcaatcaatttctattttaatcttacacattgcactaatcgacaacaacacatagaaaagaacaacgtttcatctggaaaaaaagaaatgatcaaacctctgtctcggtggtgatcggcagcttcctgatcaagccgctcccgctcctcaatctccttcctggcttcctccgcctcgcccagcttggcgagcgtctcctcgctgtagtgctcggccagcgactgctgcagcgccctgatcgccgggtcgtagtccgcggcgcaggcggcgagcttgagcagcgccgacgccttcctcgccagcgcccgcgcgaccagcttgttgtcggcgcgtagctcccgccccttctccaccgcctcgtcgcaatccctcacgcactccttgtactgcaacggagaaaccaatcgccatcgccgcgaggttaaacaatcggagagagaggaggggtttgggggcatggctgagactgagagcctgaccttggacatgaggaggtaggcggcggcgcggttggtgaggaaggagatgtcgcgggggtcgaggagggcgccgcgggtgtagtggcgcacggccgtctcgaggtagagcttgcggtaggcggcgttgccggcctccttctcccgccgcgcctccgcctccgcctcggctcgctcgtcgtcctccgcctccattgctgcgacgcgcgccttctacgggagcagcaaatgcatatcggatcgccctcggcggcggtggcggtggcggtgggctagttgtcgaggggggatgaggaagaggaggagacttgaccgtagctgcattattgacgcggcggtttggcttgggcacggccgcacggcgcgcggccaaccggaacggaggaatcttctccgagactcctcagtcctcacgggtggtgtgtgtagtgcgatgccacgagtcggggcttgggctacgcagcaacctgcaggtgggctggggctggcttgcgagtggtcacctcgtgtgagggcacgtagacgtacagtcaatttctgatcaaaattttatgggacaattgcttatttgactctgttttgaagcctaactaccaatttgaccctactttttgaaaatgaacactccgtctgaccctgtttctacaacaccgttaagagttcatttaaaaaaagagaaaaaataaaatcacatttcataatgactaaaataccctccaactgtatcctcatctaacccttttctctcccggtctctctatcatatcctgcgagtggtcacctcgtgtgagggcacgtagacgtacagtcaatttctgatcaaaattttatgggacaattgcttatttgaccctgttttgaagcctaactaccaatttgaccctactttttgaaaatgaacactccgtctgaccctgtttctacaacaccgttaagagttcatttaaaaaaagagaaaaaataaaatcacatttcataatgactaaaataccctccaactgtatcctcatctaacccttttctctcccggtctctctatcatatcctgcgagtggtcacctcgtgtgagggcacgtagacgtacagtcaatttctgatcaaaattttatgggacaattgcttatttgaccctgttttgaagcctaactaccaatttgaccctactttttgaaaatgaacactccgtctgaccctgtttctacaacaccgttaagagttcatttaaaaaaagagaaaaaataaaatcacatttcataatgactaaaataccctccaactgtatcctcatctaacccttttctctcccggtctctctctctctatcatatcccttttctctccggcgagggagctatggcggggaaggtaagcggcagagccggctggtggagggagggaccaccggcggcggcggcgggccatggagggaggggatccgcgccggcgccaactcgcggagggagggcggctgcgccggtgtggatcggcggcggcgccggctgatggagggggggagcaccggcggcggcagggggccgtggagggacgggatccacgccggcgtcaactcgcggcgagagggcggctacgccaagcacggatccacggcggtgccgctggtggagggagggagcaccggccgcggcggccggccgtggaggaaggggatccgcgccgccgtcaacttgtagagggagggcggctgcgccgagcgcagatctgcggcggtgccggtggagtttcgacccataggaagtccacccctgccgcttccagcccgccagcgagggggagctcgttgtccaggccaggcagagcgggccgatggcatggctgacgccggcacaggcgctcgtatggagggaggaggtggcagcggcagcgccggatccgccgactgcagctcgagatccaccgcccggactcgccgccgccactcctcctccttgtcgtcgtcaccagggccggcgccggctcgccgtctcgactttcgccgcctctccctgtggtggatccgtggaggagaggagaagaactcgcagccgccactcctcatcgtcatcactagggccggcgccggctcgtcgtccgtctctccctgtgatggatccttggaggagaggagaagagagaagaaaggattggagaagatagaactgacggcagggtcccagatgtaatagggtcaaataagtaagggcagaagagatattttgggcgagacattttgggcttcagttaacaccattagacgcccttaacggaatagcgtcataccgtgtcttcaattttgaaaaggagggtcaaataagcaaaccctaaaaagtagggtcaaattggtagctagagttcaaaacggggtcaaataagcaattgccccaaattttatttatcgcttttgcgcatccgctttatgcacagaacacacaccacctttctcagaacgcaccacgccaccacctttcacctttctcctcaacggcaaagccgcctttgccgtcgccccgtgatcgtacaaagtaaaaagtatagcccactactaactctaaatcatctatagccaatataatagttaatttatacaatagttgcttactatacaattaatatctagtctcacctgtcatatacacattacgtgctggaatccgtgctacagctggctacaaatctgtagcccgctgcttttttctctgttactttatccctttaaaatatgtttatagctgacttatagcctgctattgtacatgctcttataaaatataaaatagaaaattaacaagcccttcaatataaaaaaacaaaggccttgttaactttgttactatttttaaacctaccaccatttaataataccaaattgtttggacgctttcagtttaatgttttaaaaacaattagtagtgttaagatttagtagggttgtgtcgacatggaaaacacgcaattttggttgttaacaggttgaaaatgtaaataactaaacatgcaaaaaaaaaagtaagaatgcatgtggactcctttgactgctcgctgacttgtgaatgcaaccaaaaactatgttcaaaattaatttatgtgtttttgtgtcatttttattttctagccttgtttttaagccgctacaagtagaagtataaaagttcaataccataataattttgttgcttcgtgtattttctctgtagtttattgttgtagtttaaccagtttgtgtaaaatatttccacatagtacaacgtattctacatgtcctcctccccctccccctcccccccaacaaaaaaaaagtgagctttttatattcttccactctggttatatgatttttactccctccgtttttttagatgacgccgttggctttttctcacatgtttgaccattcgtcttattcaaaaattttatgcaaatgtataagatataaatcaaacttaaagtgctatgagtgataaaacaactcataacaaaataaattataattacgtaaattttttgaataaaacgaatggtcaaatatatgagaaaaagtcaacggcgtcatctattaaaaaacggaggtagtatcatttttctataattttttaggctctccttattttgtttgactttcttttagttctttttaagtcagaggaagtgtcgaacgaggaaaacacatgagtggcagataagaactgcagcttcctgagactagagaggtagaatagatagtacggacaaatggagtggcaaaatcaagatttcccatttaaaatataacaaataattatgttaacaaaattacaacaaatactctatgactaatataataaattttaaatgaataaatcaacatactattaagaattccatgcaaaattagtgagaggttttatcaatacttttttttgtcttttaggttgaatttaaggatgtgtgcggtgtatgcaagaggttctgaattatacgcgacaaaatgggtcaggctgagtcgtgttggcccaggcatggttagttggtccaaacagaacatgtcacactcgcccctgcgggttatgctgacagtgacacggcatggctcggccattgcaccaaaatttcctcctatttatttttcattattccctcctttctctttattttccatttactatattttagaatttttttccgtatatccaaattttagatgttgctccctccgtttcatactataagacgttatagcattatccaaattcatatatatgttaatgaatataggcacatatatatatttagattcattaacatatatatatatatatatatatatatatatatatatatatatatatatatatatatatatatatgaatgtggatcatactaaaagatcttataatatgaaacaaatgaagtaatggatttgcttccgccacgtgccatatttgggtctatactggcatggtccatggtctttttggccatgcctaggtctcagcggtgggccggtgaggcacgacccattgtaggagcggtgtttttaaaagttgtgccgtgctatcggtgtgtatatttatatttagaatacaacttattatttgtgcaggtctacatatatatggtgaaaaaaagaaatacttcctcagccaataatttgacatttagcacacgattttttcaaacttttaaaattttagccatcaactttattatataaaaataagcttataaaatcaaataattttgcgatattatggtagcactttttagagaaatctacaggtattactccttttattttgaagtaaacatttacgaaatttggtcgtaattttgttcttgcaattaaatatttatggagcagaaggtataccgctataccagtactaggcctgtggactcggttgtgcggttgcaccggatattctgctccggcataaaatcaccagtacacacactccccgccggccgcggccaccaattagttttccgatggctatgtatgcatgcgcacgcggagctcgcgcgcagaggatcgatgctgccgaggagggccatgggggtggcgctcaccctcgcgctgaccgccatgtggcctccgccgcggctcgcggcccccgccactggtggtcacgtgaccgtcacggcgaggaagccgcggggtcggcggctcagcggtaaatccaccaccaccaccaccaccgcttcactcggctgcggctccaagccaaacaacatccgcggcgccaccgccgcagccggcggagggagcaaaatggaggccgccgccgccgtcgccccctccggtctccgggcgagcttcctcgacgtcctcctcagccgccgtcgtaacctccaaggtctccctgtccctctgttttctggattagtgcgctcaaaactacaggaatttgctattggcattcggattaggtgtgctgattaatgccttgggtttggatttgttggcggcagtggctctcacggtggagcccgggagcccggtgaagcgcccgctgtaccaggggaggccgccgatggggcggagcgaggtcaggatcctcaattggaacaatgatctatctgtctatcttgtgtttgtgtaggagcgtggtgattggtgtggcgttggttcttcttatccatgcgtggaaaatttcaggccatggaatcgtgcccgaggaaaggggtggtgaactccaaggagaagttggttgaagaaaatttctacctgattactgaggtacatgaccacattgctttcttctttgtgatgcatttgaagacatatggaaccatgtggaagccattttttatttatttgagctagccgccccaagagattgtggtagaacaacactaaaagtataatggattacaaaaggttgactgtgatttttgttgcttaaaattctagagagatagttactgtggttactgtctcaatatgtacctttcactaccaactctgttggataaatatctatgaaattcacgagtttcgcttatgggggtgaaaaatacatcgttattctgccacgattcttcctggaaaggctacacatggacaatttgatagtttatattatgttttattgtgacatccaggttcacatgcactcttatgtacctacattatataacctggaaggcaatgcacattggattcattcatcatctcatttcctaagtcagagaatttgatattgtttcccccaacagtcaggtgaacaagggcgtgtacctgtgcttcttctgaaacttaacgatacaacccctaaaagaaaaccagttattgtattcctgcacagctcatataaatgcaaggaatggctgcgtccactgcttgaggtaaatatctccttatttgttgctttagaaaaaaaaaagcctcttactgaattctgccacaatgctttggaccatcactatatcgtacacgcatatctattttgaatttgacggtttcccgtttgcaggcatatgcctccagaggctacatttctgttgccatcgattctcgctatcacggtgaaagggccaacaataacagcacttacatagatgtaatatgctgaagatcctttctatgtaccatttggttccatgaatgtttgaaaattccattaacacttattatttgacttgattcctgctttcatggttttaaacttaggcactaaaatcagcttggaggaatggggatgcaatgcctttcattcttgacacggtaccctacgttactgccattctgttatataactgatgactttgcccttcttaagcttgtcattcaaattgttaattaacctgtatatttgttaaaataagcaaatggttgtgtatccaaaatattaaatcagactgtaggatatgctgtaaatttgggctggtctgcctctgttcatgggttaaaagtcatggatgctggtgttagcccagatgaaatagcttcagcacgctctacttttcccttgaatcctggattttcaattttgttttgcttctctcaaacaattgtttctgatgttatgatctgatatatcatagtttgaacatgatacacagatgcagtgataagctgtcatatttcacgatagatctattttcaataatgtaccttaaaccagatttggacatcttcaggtgtgggacttgataaagcttggagatcatctcagtgaacgggaggatgttgatccctgtaggattgggattaccggtgaatcacttggaggtattgtatatcatgaattcatgattgccttatattgagctagcatatggactctgctgttactaactaatatgtaattcaaactgaatcaggaatgcatgcatggtttgctgctgttgtggatacacggtatagtgttgttgttcctataattggtgttcaggtatgctgtttcagttaaaatatatcgatgtggaaagaaagttttgtgggttgtttttagctatactccctgtgataactctagggatttcgatgggccatagataataacaagtggcaagctagagttgatagtatcaaacctctatttgaaggtgagactccactcataatctcttgcctatttgagaagttgggcttgtgccagtgaaataaatagactgatgttgaaatatattctcttaatttggtaaggttgcatgtaaatgtttatgtttcttttaccctgtccgttttctgcagaggcaagaattgatctagggaagagtgaaatagatacagaagttgtagaaaaggtgagtacttggatttattttactgttattcctgatgagtcctttatgagcatttcgttttcgttattgtgtgttaacatatctctgccaggtgtgggacaagatagcacctggtctggactcacaatttgatgcgcccttttcactccctgtaattgcaccacggccacttctcctcctgaatggtaagccaatcacttctgactgaatgcaaaatcagtatgactgactaaatgaaagctagttacaacattaaggtataaaacagtgatatttcaagattgttcgatacaggattcataagctgtaaaacagtgtctcacttttgaacttttccctttatgcattcaaccagtacccgtgtaagggttgcaaccttgagtgtgcagtacttttttgaaccaaagaaaaagtgtactgtccattttggttttgtgatgaagctaaaactgttgttatctattgataattcaaaaaagaatgttacttcgaatgtttcgtgctgcttgaacttcatttatcatgcaggtgctgaagaccctcgatgcccagtacttggtttacaggaacctgtttccagagctgctaaggcttatgaagaagttggttctgcagataagttcatggtaacacgcacttaaactgtcctttttgcccttattttaagatcacttatgaatccttttaattagcatttattaaaatgggattttgtttcaatgaacttagctttcaagcttgtttccttccttgtcagtatgaatggctaagtctaaacatgccagataatttattggtattatgaatctacaacacatctttgtgaggttggcattgaagaagtcttttatactgaaaaaaacaaagtgttctttcttctgagttaaagttgtaactcagcatgcacagcactaaagagcacagaccttcagcatctgataaaaagttttttataactgcactctataatatggttaaaaattattttgagcttaaagtcataattgagtaactttaaacaatagaagatgatgaaaatgacagaaatttgtgtagggaaattcaagaacaagatcacaaaacacagtttttggtgctgcaaaccagcagctttgctgattgtagattcaactataaatagaaatgattacaaagtgaaaatgacagtggccacctcgcctcctacttgcacgcgccacgacccattgccacatcgtgccatcccacgatcctgagcacgggacgcatgactcaatggactccgctcagacgcagcgtgcatcaaacccactctgcgcacttctgaaaataacccagccatgcactagaccaaaaacagatcaacgagtggagagaaaacaaagcgaaataactaaacttgggagcagctagagttattctatcagaaaaactaaatatgccccccccccctacccccataactgatgcatgcagattgtttttaaggtacagtatgttggtgcttgtttaaacaaaaaatatcagccttttacatccttactaggagtatattcatgtatgtaagctggcatattcttcgaaacaatttttcgggttcagtatccgtttaaaaatgtctctgctcccatcgcaaataaaaatcttggttcagtacatgattgattactgttgatagccaatagagaagtgaagtactgtgaggaacctgcttgaggtctggacctctatatgtgtttattatctgaagactgccttctgttatgagctaaataaatgctgctctggaactatggcttttatggcaatagggtgcccacatactggagtgcttggagttcaatactttaatgtagtaatcattgcctctgatgatggatggttgatgccttcgttcgtgtagattgctccaacctttgcatctcttccttttacatttctactttaagtgctttatgccaacaatttatcttcctcgtctatatgacaaacaactgatttggttgagcccaaagtaactggaaacttaagatttagctttgcttttaccattaaagaactaaaaggggaactgttgagttgctaatctatttctccactgttcagttcattgcagagccaggaattggccatcaaatgacagcgaacatggtgaaggaagcaagtgattggtttgatcgcttcctttagagggttatgtatatgttccgaatactcttattataccacatcgtgagggaaaggcatactctacaacaagttgtctcagtttataattgcttatattgaatatatgactggaatcgattcaatttcatcaccatctaatttgtagtctacataccctaataattgccaaaggagaaacattttgtagcatgtaggcatttcacagtttgagaatacagaagttgggaggaagattatttatctgtcaaggttctgatgagaaagactgatagtagactattgctctgaagtgctactagagcaaatctaaactggtacaaaattttgttagtgtgcacataaaaccatgtagactagagaattgaggcatcgtgatcaatagattatgtttggatcaattaaactatatattctgcagaaatattttatttcttgtttcttgcagtgtaacagaaagaaaatccccatgatcctgcttattaaccagtgtccagattcttgatgacatgtcaaccacgccaatcaagggctcaaggccagtcggtcccctaatctggtttacgtggacccaaatacccaataaagcatctcactatactggccatgtagccacgtgtgtagtgcgatgatatagaaccgtcgtttgcactttgttgcctgcaggctcgcatcctctgctagcaagcccgtgtccaaaatctgaatttaaattgattttgagtatttttcatcgttatctattctctagtcttgactttaaaccgtgaatagtacagatataaaaatttttagacataatttctgttttcgttcgtttacatttccatggcttatcagccatagctcaattaaaatcagagtataactcataaatcggtgtaaatgtgtaatgtgcatttctaggattgttgtactcttttggcagtcaataaaaaaatagtgagaaataagtgggacagcagtggcttttatgaaggttcgtgttataagtaccaaaatattataagtttataaccttttgaacccatttgagttgagatattcctgtagaattttccctaaatgtctcacagtttcatttcataatgcatgtaaaattccaagtttggcaagggtgtagggcagtttccagatgaccacatactactgtcctggcaatacaaagatttgctcttgggagtaatatacatgagaaaatatatttatcatgagaatagtgtggcctaaccaatgatcttatgatgccaacattccaacgttttccatccacacatgcatggtgagaaacactacaatattgtgtcaaaaataatatatgaaaaatcgaacggttgatgaagaataagttggcaggtcatgctcactcgttcttcctcttcttcggagtaggcgatgtgtcactttgaagcatggacgtctccgggtaacggacggttttcatatagcgtgttcgttgctaggtcattttccggctaaacttaaattaatttttttttctggaagagactattataatgttttctgtggttctgtgacgtccattagtccaaaaaattaattaacgatgtttgttggtgtctcgtctcatttgagctgaccataatatacgctgatattcttcattccgtcatccacctgtaagatgatatttcaaagtacagttacacatgctttttcattccggctacctgtaattcgtaagatgatattccaaagtacagttacacatgatttggccaagagatatggtcagcatatgggcatttatttttttaaaaaagaaaaacaaaaggtataagctcatcttatctgattgtaagttgtaacacagaagaggaaacacaaagccaacccaacaagaaggacacatcaaaatttgaaaatgccgcgacccaacaagtaaaagggtaaacatcaaaggtatataaccatttttttccttttcttaatattaaaaggctacaatttggggctgcactaatccatcccgaatttgttagaaatacattatgcgagaattttccatattataaactccctccagtctagttctctagatgtcaaatatatttaactagagtttcttttcttctgaacaaacattagaccttgcttggaatgggggatatcttttctcgattcctatctgtttcagtagacagccctatgctccaagctgacccatgcccttcagcccttcacagagccatcactacacgagtttaattagcatctatcttttcagaattgacttaactatatatcgttgttcttctgtacctctgaatttctctgctaattcccatcataatccatgctgctgctgctactctccatgaatccatgatgtttttgagccttactcatgggagatacaatggcgttgtgtgtgtgtgagagagaaaggggcatagtctggatcgacaaaggtacaaacggccatgaccgacacacaacgatagcaaaactttaccaaaaaaacgattccaaccaggtaaagacgttcacatatcgctggtacatgattattggagtttattaattggttcgtatcaattcacggctctattttcacgtaccagcaaaacagaaatgtggtacgctttgcacatgcgatctttcaaaaacactatgcacacatgtgaactgataaatggccgtccaaatccttttagagagaggtgtccattcattttgtatagacttttttagcacaatcaactgaattgccaaaaagtactacttctatctcataatatatcaacataaaaccggattgaacacaatttaatagtattagattatatccaatctagttttaagttgctatattactggatgaatggagtaattaattagttaagcaaatatatagaggggacaaatacctaacagaaggaagctattgccggatagagaattcttgcaattaacaaccacccaaattatttgtttcttgtttggttcatgcaagcatcgtgaacgggaatacaccctttgcctcctttccatccagcttgtccaaaggaaacatgtcaacttcatacagaatcagacgagtagcatgcagtccctctcagcccaaatctccccatcgtattcaatcgtcattcttctcaccattaatttacctctgcattacatgcagatgctcttctatgtataaactacctgaatgcccatcctttactacggataaagaataagaaatattcacatcgatttgattttatacgtgactatctaaattgatttttaatagaaaaagtttcgagggatagttttaaaactataatgggagtatgtgggtcaacagattcactgttatcaccactatcttcctttgaagtgtagtagtataaatacacaattgctcatactcatctcatcctgtcaaactaatgtccaaattaaattaggtggcttggagtgtaagactgtactaggcattaagtagattgatcaagtaccctaaagattgaaattaaggatatgacacccttaaaatcttgggcatagtactcttatcatgtactgtaccacagttgtgtttgagtacaaataattcacaggagttaatgctctacattaaattcaaagttctcaatatattatctcaaattcttaatcagagccctatcagtcgatttgtcgtttaatttccaatgaattttgacaacatttcaaacaaaaatgcatacctcaagctggcttgactcgttcaatatcataaaattcgtcgagattatgaacgtttggttgactgctaatggctaacgttgtcaaatctcaccttagacaaggtacagcttgccgtaaaaagtgtggctgggaccacacattacacaatctctcgcaaaaacatgtctttgatgtatgggaccttgtggttgaaaaatacggctaatcgtaataactagaatagtttcgtaataaactatgacatcaatgaaatggttaggtaagaaaattatgtccgtctaaaatttggcttgataattggaggcatccagatagatacccctaaggaaaaggaaagagaggctgaaatgccattaaaaaaagtgactcgcggagctgatgatccagagtgacagacagtggatgagtggagtggaggtataacgcagacggacattcccttctcctcccaccccgtcgctgccgacactccaataacccaaacggcgccgtcaaaatcctaacaactaaaaatcccatcccctactcccgcccaaaacaccaaccaccactccccccacacactactcccgccacgtggcacgctcccactggacccgccgtttccaaccgccgcagaagatcccgcgcggaggttgccgtcgcgttactggccttcccttttagtgccccccccggacacgagtgctcgcctctgccgcgcctgcgccaccaccaccaccgttcgtccgctcgccgcgtcgacgagctcctcctccgcttcgcgcttcgtgtcaggtgcgtgttccagcgccggatcgtctccggcgaccggttcttgcgggagttcggggctcgcgatgatcccaaaaccccggggagatgtcaagaacaccgcgtcttgttttttttctttttttggttgtggttttgtttctctctctctctgcgcgtctgatcgatcgctcgcgtgttgatggtttcttagggtttggagtggagtggagggggaaggaaaagggggagggatgatgcacgcgaagtcggagtcggacgtgacgagcctggcgccgtcgtcgccgccgcggtcgccgaagaggggcggcggcgtgggcgtgggcggcgcgaactactacgtgcagagcccgtcgcgggagtcgcacgacggcgggtacaagtcgtcgtcgatgcaggcgacgccggtgtacaacagcccgaacgagtcgccgtcgcacccttcctacggccgccactcccgctcctcctccgtcagccgcttctccggcaccctccgcgacggctcccgcaaggccggcggcgagcgcaaggcgctcaacgacaagggctggcccgagtgcaacgtcatcgaggaggagggcccctacgaggacctcgccggcgacaccggcctctcccgccgctgccagatcgtcctcggcttcctctgcttcgtcctcctcttcaccgtcttctgcctcatcatctggggcgccgctcgcccctacgagcccgacgtcgtcgtcaaggtatactactgcattttttatttttttgcattaatttacttcttgaactgatgtaatgtctctacttaatttggtttgcttcccccaattcacatcgtggattgaaatgccaagtatacttaattgtgatgtttgtgtcgcagttgcagtttgggtggaaacgggtaaagctattgaattgattggtggtttggtttgacactaatttggaagtgatgaggaataagaaaataatgtagtttgtttactggttttacatttgtttgattacagtttacaggttgctctaactagatggtaaaaattgggaataaatttggttggtagataggctttgggaagaatagcttcattgaatatacaacagttcgagttgttgcttgttttgattgaacctagcacatcagcatatgtgctttactctctttgtggttgtgaaaccaagttataattgtttctgtataattagaattctatagccgtaaagtatagaaaagtgaaaacaacagaagcagctttagtctcattttatattagtaataaaataaatatattaatagaaacaaaaaaaaatgacccaagagcaaactggtttcttattgttccctgtctgatagagatgtcgttggctgcaggcctgcacctgcattcagtatgtctgactgtttgtttcatttcctgaccgttgcccactccttcaataaaaatgaaatcgccatagagtacttaacatacatttgtattgtccagtagtttggcatggtaaattcttcatgttgctcaaaagattttcagaaatctgaacctgctggattcctcaaatgtgttctagccaggaacttactgtactttttgtttttcacagagcttgacgatggatgatttctacgctggtgagggcacagaccacagtggggttccaaccaaattggttacactgaactgctctctgcacatagctgtatacaaccctgcttcaatgtttggaatccatgtcacgacgggtcctattcgccttctctattcagagatctctatcggggttggacaggtatatctatcaacagtcattgtttttttttgtaatacttgttagtgctggccatgtctctctatcacaccttatttttctttgagagaattctctatcacaattattaatgctgtcgataaattgtctggtaatgctaattcactttttaccaaaaaagtaaactacattactgaatctcctcctttgcctctccctttcaccacacatataaaagctgaattcaaagtatttaatctgttttctctgctgctttcaaagcaatgtattagtggaacattttcttgtgctctttctctgcttaatccatttctttccctacgcattgtatcaaaggtcaacaaatttcaaactttcaactaggcaaacagttatttttgagtcaagtgggtaaaatactaaagcatatcattaccataggggataaaaaaggggaatgaattattacggcgatgaatattccgtacagtttcataagacaacaaaacagtacgataactggaaatgttttgggaaacaagacaatgagaaacggtccagagattcttctgttcgcactgtttatctgaatccatgcttgcgtttcatatgcatgcagtacatttctgtcttttaatggtttacccagaaccaagaactcatgataaggcctggtttagttccaaattttttttttcagaattccaactttttcatcacattaaaacttttcctacacacatcaattttaatcaaactttcaattttggcgtgaactactaccagcccacaaaactaacagctaacaattctttgtaatttcaggttcgcaggtactaccagccgaggaagagccaccggttggtgacggcggtggtccacggcaacaaggtgcccctctacggcgccggcggcgggctgatgctgtcgagctccggcggcgcggtgccattgacgctggacttcgacctcacctcccggggatacgtcatcggcaagctggtgagggtgacgcacaaggtgcacgtgacgtgccccatcgtcgtcgacgccaagaagacgaagcccatcaagttctccaagaaggcctgcgccgtctacaagatctgagaggccatcgtcgccgccgccgtcgccggtcgtcgtccatcacgccggcggcgggcgtcgcctgcagtgatcgatcggcgacggagccgttcttctgttcttgcagttgttgtatgtattatgcttgtgaagaacaataagcgtttatatggtcacttgttaattttacttgagcttcgattttgttgataaatcagtaaatcactttgtatggtagtagtgttttattttctctgctttctttctttcctgaggaaactatgtaccgaagtgtggtactagagtcagtctagatggttttacgttaaagatcaccatgtttacagtttcgcatggacaatcactgcattttgttttgaacagagcatattaaacagcaagcaaaaatcgtgtttcttttcacctcaagaaatggtacaaacctgtctttcaaggattaataatcttctatggcactgaaattttgcaaattatttcatgtcaaaaatataatgtgatattagtaaggttttgtgtaatttggatgatccttggatccagcgcccgttgactccccgtatagacaagagaagtgctgagctgacctccgagctcaaatcacatgcaaattcggctcccaaactttgcttaacccttaatcacgcggtcacgatccaaaccccatgtgcgtgcgaagcggccgacacgtctatccctcatgtcactgacatgtggcccccaccactcgcgtggccccacacgtcagtctccgctctccccccgtgatcgccgcggcgctctcagtctcatctccttcgccgtttgaacaatcgagagctcgccatttcttcgatctcctctcctcttctcctccacctcctcctcgtggcttcgcatcgcgtggagctcgtagtgtgctagatctaggaggaggcggcgatgagggcgcggagggttgtcgcggcggcggcggtgctgctgctgttcgccgttgtggcggtggcgcggctcgacctggacgacgacggggacgactcggaggtgctggacgagctgctcgcggtggacgaggaggaggagagaggggagctcggtggaggaggggaggcggcggcggcggaggcggtgcggcgggcgcagtcgatggtgctggtgctcgacaacgacaacgcgcggcgcgccgtggaggagaacgcggaggtgctcctgctgggctacgcgccgtggtgcgagcgcagcgcgcagctcatgccgcggttcgccgaggccgccgcggcgctgcgcgccatggggagcgccgtcgcgttcgccaagctcgacggggagaggtaccccaaggccgcctccgccgtcggggtcaaggggttccccaccgtcctcctcttcgtcaacggcaccgagcaccaattcactggcctccacaccaagtgaggatgctgcccgttgtgtttgccatttcgttctagaagctgccgttaacgtgctcgatgaattgactatgggaattctgtctttgttgttgatagggacgcgatagttacttgggtaagaaagaagactggtgcaccagctagtaggattcagtcaaaggattccgctgaggaatttctgaaaaaggatcaaacttttgctgttggtcttttcaaaaattttgaggtatgttagttgtctgatggatttggatacaagatatatatgctctacgctaaatataaaagcttgaataataaagttcatagagtttgtttcattacatttagaggttattcacccatatccatcttttttgggggcagggagcagaatatgaagaattcgtgaaagcagcaacctcagaaaatgaagtgcaatttgtcgaaaccaatgataggaatgtggccaaaattctttttcctggtattgcatctgaagagcaattcctgggccttgtgaaaagcgagccagaaaagtttgagaagttcagtaagtttcttctatattacccattatagaaaaaattctttggatggttcacttcacccctttcattttggtcttttagaccatagtttgatgagtaacttcccaatgaaaagccttactgaacactgaaagatgatctttttcttctcttatattttggtatttatgtggtacaaagttacacgttggataaacaatgctgttcaatgtagcaatcagattttagttggtgtatccaaaaagtgatataatggcatttttttgcagacggggcatttgaagaaaaggagataattcaatttgtggagcttaacaagttcccacttattactgtattcactgatctcaactctggtaaagtttatgggagccctattaagctacaggttggcactctctgcttttctcattgtatgaacaagtggaactggatagaagtcatatttctggaggatcaaaggatgcaacaaactatgtagttcaaataagggaaaaataataatccttgatgctttttataatgatatataattagatggtcttgtaaatttgttataggtcttcacctttgcagaggcttatgatttcgaagatcttgaatctatgatccaagaggttgccagaggattcaaaacaaaggtgtgcactgctgctttgttcatttctgaggctctgagccaataccatgtcacctgcatcactgcataggctgaaactgttttctctttcactctgcagataatgcttatatatgtggatactgctgaagaaaagcttgctaaaccattcctgactctctatggactcgaaccagaaaaacctactgtaagtttgtttagtattgaatgatggatctcattctagagtcaagtttccattattttaactttttcctccagtagatgaaggagcgcgtatgtgctcatatatatatatatatattatgaaattaggtatatccatgaaggttggatggataaaatagggatggcatcaaatcgttgcttacttaaaattattgtttcattgataataataaatattgtgctaattggtctgggcacactcttggctattgttacagtattttgtttctctgttatttcacatgatagacttattgctaaaacaaaaaaaattcactaggtgacagcatttgataccagcaaaggtaccaaatatctgatggaggcagaaattaacgcgaagaacctacaggttcttatttatctttttcgttttatgctacatacttaaacaagaccacttagttgtatcatgaactggcaacaggacttctgcttaagccttctggagggtacacttccgccatacttccgatcagaaccagtaccagaagaagtaaggattaattttgttaatttcgcatcttgctgttcaatgtagtatgcaccagatctttcaatgcattatgcatcagagctgaattctttgcacagcgtagcttagagataaccatatgttaagggtgcagcatcttaagcacgatttactttctgaaatgtttacagtccacattttctttgaacaatctttagaatttttggaaaaaatatccctcagtaatatcggaaagatgtgcgaattggaaacataacatctaacattttgataactgagctatagttcaaaatgctctatatactgcatgtatgctagtagtttgggttcactaccagttactccatgacctgtgttcaagtataaagcagttactactttccatgttatatgagtttatcacaagaaagaacacaatgacatgttttttcttgttaaaattttgtaatttgtaattagaatgtttcatcctcactcaacattttgcagaagggacctattgaaaaggttgttggccgtacatttgattcttcagttctagaaagtcctcaaaatgtgttccttgaggtacgtgaactttatttctggtctcttttatggccaggtacccatcatttctacttatgaaaatattgactttattctttccgagatcttacacccttttttcccctaaaaaggttcatgcaccttggtgtgttgactgtgaggccataagtaaaaacgtggagaagttggccaaacatttcaatgatttgggccagactaatcttaaatttgcacgcatagatgcttctgtgaatgaacatcccaaattgcaggtaaaccagtctttgcattaccatcatacaccgtatgccagtagtacagacattaaatgatgcataccatttcagtgatccatttactctaatgcactatcaattttagagcagttttattattgcaattgcgatgtagccacttcttaaagaaaacataaattcttgtgagatactttatgaatttggaatgagatgattctatggttattctgctacacaagcatataactattggcaaaaaattaattacatacaagaaattgtaacctcaaatgtttattagagaatgacatggttgcatgggtattacattaccttgcatggtagtgtcaactgtgaagttcgtctgttcactgcaaatgttcccatgctgaacttggtaaagtaagacatggtttcattattttccaatggcaatatgttgaagatcagatgaggttttggtgagcttgatggcacctgtgactgcacatttaaactactttccggtagaatagcttaaatggtggattgatattacttaacactcagtaactacgaatctcttagttaattttcttgattactggaagcatagcatgttcctttatgcaatccaccatcacaaaggtatacaatttcccttacaattgtccattcctccatacagataaacaactaccctacactgttgctatatcctgcccaagacaaaagcaacccggtatgtcctctaaaatggatgtgagcttactgtaagctattgtcactacatgtgctaataacatactttcaaatgcagataaaactttcaaagaaatcaaatctgaaggacatggcaaaattcgtcaaggagaagctgcaaattgcggatgtcgaaacagtagccgctggtgacattgtcaaggatgagctatagtagatttctcacagctttcgggcatgctttgtgcagtgaatgaaagtaacagcatgcttgcattttgctggaatgctttcacaccatgcttgtcttgggttgcaatgtaccatttgagataaggaaatagaataggaaatgatcaaacgggtatttaagttgaactatatgaccttccagatttacttaccgtcgcagcatcagctgttccttttaaagatgtgatttactatacatgttattagttgttgataacaagctacatttgtttgtttgttgagctgtgacttgtagcattgttctgtaacataaaactacaaattctgtccaattttgtatcctcctttctagtcctttattttgaaaacgttgggcaaacaatccttttgctactgaaaggtctcatgatgacagaggcaattttttgaccaagaaaaacatactttacctaattttcccaagtatacttaagtgtggaaaatgcaggaatatctcccaacacgaaataaaaagctatatgaactaactattcgccaaagtaaacatgaacgaatgaaaaacaaaatttgatttgaattgtagggctttactctctccgaagagagagagcccttccagaaattctcagtggcccgggtgggccaaagagggggtttggaaatagttttcaaccagcaattgacgcgcctcggtataacctcataagctgcgtcattgccccaagcgcaaagataccttcaaacgtttgcccccctcccctctttatacccgcagacctcccgcacatctccctcgacagccgaggtggtactaaaccaaacatggaaacacgaaccgccttaactcgcctgggcttttcttcccttctccatgggcctcgctttctccgtgtgggcttccacctgcgtttccaccaggcccaaattaggactaatcaaggaattattacctcctgtaaataattttaggacaatctcggtgaaaaagcgatcattaactgcgaggtaaaaacgctgaccccactagcgagtgattttctctctccgtaacactcgaagtagtagtggtagtcgagttaattacgttttgcttctctctttctcgtttccggcgaggcaaaacgggcgggggcgcggccgatctccgccgcgcggcgcggcggcttgatctcggatggcgctggagaggcggctcgcgtacgccgcgctcatcccgttcctccttctcgcgctccccatcctgccgtccgattccccgtccggcggcggcggcggtggcgcgggtgggggtgggggagggggagaaaccctagacccgcccgcggcgaagtacgtggtgcggttcgtcgagtaccggcccgccgacgagcaccgggagtacctggaggacggcctccgcggggccgcgcggcctccccccgccgcgtcgtggcggtgggtggagcggcggaaccccgccgccgcgttccccaccgacttcgccgtgctcgagatccgcgacgcgtgccgcgcggctgtcgtcgacgccgtcagtgcgctcggccgtgtccgggacgtgcacgccgatgcgagctactccaggggcgtcctgtctgcggatcggccgcggcagcaggggaagctgttcacagccatgtcgttcgagggggaggaaggagggggagatagggaggtcgggtgcagcactgatagtaataattcctcttctgctggttggaggcggaagcttctcgtgcaggtagacttctgctactcagaatctccacgtgatcatttttatccattttcgtgtcaataatgattacatgcaattgaaacataatgtattaagatctttacatctatcttcaagaaggaataaacctgtgaattgtattgaagatcaccatatatatgttttgatgacaaatttgtcggaaactgaaaaaagaaaaaaacattggtattcaggcaaaggtatccatgtattatcctcaggtagttagtgaatatgggttcaaaatatgagccttatccatacaaaccagaactggaaattgatgtactgtgtagtgtattagtgtataatctgctactctgcttaaaattatagcatgacactacacagcggatacaagatgccaagacacttccataagaacctgatgtgtaacatatacatccatgtcaacagttctgtccatgtgaagttatcaggttgtatgctagaatgttttagcatgacaaggtaataacatgtgtccttttacagagatcacaagtaacgtctctttttggagctgaacgactatgggggagaggtttcactggtaggaaagtcaagatggccatttttgacactggtattcgagcagatcatccgcacttccgtaatattaaggtataatatgatgctagtaaatatcactgcctgtgattatggtcaaatacacatgcatacaaaggaaaaagaacattggtttggaggggaaaacagaacatgcattatatacaacttcatattctttatggtgtttccttcctggtctcagatgttgtattaattattgtcaaattgccatccatactgtaattgggattccttaaaagtatcactattgttcctagtattgcaaggcaagaacacaatgataaacatgtattattatcctaaatgttgcctctccttgcctcctcgttgtttgttatccccatcacacttcttaagaaactaatttttgtaggagcgcactaattggacaaacgaagacacactaaatgataaccttggacatggaacatttgtagctggagttattgctggtcaagatgcagaatgccctggatttgcacctgacactgagatatatgcatttcgagtgttcacagatgctcaggtatggacttggctgctatacatgaactatgaagcacaaaaaccagatattctttccctgtcaatttaattcattctttaacctttgatattgcaaatggaataagtgtttcccaaaattatggaaatccacctgtaacttttaaacttttagaacatagaatttagaagcatatgtgtgctgttctttctatatatgagcataatacattttaaaatctctcagatgccttttatccacgatgtgttatccacggttaaattttatttacgtgtttgaaagcatatacaccaaactgttgttagaacacactgctggtaagattttgagaattctatcttgttctcagtgcagatatcctacacatcgtggttcttggatgcatttaattatgcaattgcaactggtatggatgtactgaatttgagtattggtggacctgattatctggatctcccctttgtggaaaaggtagagcaggaggataactttcttcatttccctcaatcatgttcctatttgtactgcattagaatttgattttgtttaaaactagaggtcgttactgtaggaataagtcttggctggttggtcttggtcttgtggtgcctttttcctgcttttcagctttctaggacagcatctctttctaggacagcatctctactttcagtttgagatgctctaggacagtttgttgggatgctctgctctaggacagtttgttgggatgctctaggacagcaccctcttagactagcatggctgcatggctgctacaagcagctataaatatgtatccaatcctttttgggaggatatggcttttgtgtttagtgaatgaagaaaaccagaaaattgccccatctcgagtgccatcctcttctcaatgagagtaaccattgaaattctaacatctggtatcagagcaacactttcctgtaggctaaacatctcttgttccaccccttcccaagctcggttgagctctcagccagcagcagcaccagttgctcctccttcccctttcccttccccctctccacgcagcagccccccgcaggtgcgccatgtccgacgctcggtctcggcgttcggacgcctcgagcactcggcgtcagcaggacgccgagctcgccgcagcagaagagcgcaggcgagcaacagctcagaccgctgcagcagcagcgagggcggccagactggcggcagcggagttggcagcagccagggcggaggcggaggcggaggcggcgaaagatgcggcacgtgcggcggaggtagaggttgagaccttgcgcagcagcatcaacggctccatcgccggcgacatcaccgccgacagggagcttgaggagctggcaagaggaagggcacgggagcgggcagagcggtgggcagcagcccacctccacggcggcggcggcggtccaagggaccgcgggcccgccaacgggaacccagatgggcgcgggcgtgccggcggcagcccggagcccgcacgcggccctcgcaggcagcgcggctctttctcccctgaccggcgccatggtcaccacggcgtccagacggtggtcagggactttggtcccggcggtgggtggcctaccctcaccaaaaccaactacatcgagtgggccgcagtgatgagggtgaggctccaggtgcggcaaatgtgggaggcagtccggtacggcgacgtcgactacgacgaggatcggcgagcactggatgccctcatcgctgcagtcccgcccgagatgcagttctcgctttcccagaagcggactgccaaggaggcctgggacgccatcgctgcggcacgcatcggcagcgaccgcgcccgcaagtccacactgcaggcactccgcaaggagtgggagaacctggccttcaagccaggtgaggatgttgatgactttgctctccgtctcaacactctcttgcagaaaatggtgcagtacggcgacgacacctatgacgaggagagagctgtcgagaagctcttccgctgcgtccctgagaagtacaggcagatcgctcgctcgattgaatctctgctggacctctccacgatgtcgatcgaggaggcgttaggtcgcctcaaggtcgtcgatggtgatgagccacagcctctctcggggcccatcaccatcggcgggaagctccatctcactcgggagcagtgggaggcctctcagggtgacgggaggaagggggagtcatcttccccgacaggcggccgtaagccgcgcaaggcgcggggaggtgtccagctacggtgggcgcgaagacgtgccgagggtggcgcccgcagaggcgcccagggcattgccactggcaaccacaagccggcacgagacgacgcctgccgcaactgtggcaagcttggccattgggccaaagactgtcgacagccacgacgcggccaggcccacgtcgcacgggtggaggaggaagagccggctctgctcctagctcacgcaagcatcgagctacctccagcggcaccggccgcagcggctttcctccaccttgatgagccgaaggtactcgtctccctctgcgacggctccagcaacgacaaggctgatgggtggtacctcgacaccggcgccacccatcacatgacctgccgacgggagttcttcaccgagttcgactccagcgtccgaggctccgtcaagttcggggacgcctccggcgtggagatcaagggtgttggctccgtgaccttcaccgccaagtccggtgagcacaggctgctcaccggagtctactacatccccgcgttgaggaattctatcatcagcgtgggacagctggatgagaacggctcacgcgtgttggtcgaggacggactcatgaggatttgggatcgccgtcgtcgccttcttgccaaggtaaccagaggcactaatcgactctacatcctcagcgcgcaggtcgcacaaccagtttgcctcgccgctcgtcgggacgacgaggcatggcagtggcacgagcgcttcgggcatctccacttcgaggccctgaagcgcctcagtgccaaggagatggtgcgaggcatgccgtgccttgaccacgtggagcagctctgcgacgtctgcgtggtgacgaagcagcggcggctcccctttccccagcagacgagcttccgagccaaggagcggctcaagctcgtgcacggggacttgtgtggcccagtgacaccggccacaccaggaggacgacgctacttcctactgctcgtcgacgacctctctcgctacatgtgggtgatggtcctcggcagcaagggagaggctgcggatgccatcaggcgcgcgcaggccgctgcagaggcggagtgcggccgcaagctgcgcgtgctgcgcaccgacaacggcggcgaattcacggcggctgaattcgcgtcgtactgcgctgatgagggcattcagcgccactacaccgcgccgtacagcccacagcagaacggcgtcgtcgagcggcgcaaccagacggttgtggggatggctcgggctcttctcaagcagagggggatgccagccatcttctggggggaggcggtggtgacagccgtctacatcctcaatcgctcgcctaccaaggccctcgatggcaggacaccgtacgaggcctggcatgggcacaagccggcggtctcccacctacgggtcttcggctgcctcgcgttcgccaaggagctcggccacatcggtaagctcgacgacaggagcaccccaggggtgttcatcggctacgcggagggctcgaaggcctaccgcatcctcgacccggagacacagcgtgtgcgcactgcgcgcgatgttgtgttcgacgaagggcgagggtgggtatgggacaaggcggtggacgatggttcgactccgacgtacgacgacttcaccatcgagtacgtccacttcgagggagctgggggagtaggcagctcttcatctagcgtgtctaccccagcccccgaatctccaccgactccgacaccaacacaccctcgggccacgacttcgactacgacgagctcttcgtcgacaccaccccagccagtgactccacatgctccagctccaacagccactcctccaagcacgtctactccgacgccagctcgtgttgagcgcagcccggtggagttcgctactccgctctcccacgacggggagcgcatcgacgcgtaccacgacggcgagcagctacggtaccgtacgatggaggatcttctcggcgaccagttggtgccgggactggtgcctcgcgacttagaggcgcagttgcaccttgcgtgcgacgacggtgagcctcggtcttttgcagaggccgagaaacacgcggcatggcgtgccgcgatgcagtcggagatggacgcggttcaggagaaccgcacctgggagcttgctgacctccctcgtggtcaccgcgcaatcacccttaagtgggtgttcaagctgaagagggatgaagccggagccatcgtcaagcacaaggctcgcttggtagcacgcggtttcgtgcagcaggaggggatcgactacgacgatgccttcgctcccgtggcacggatggagtccgtgcgactcctttttgcgctggctgctcaggaaggctggggcgtccatcacatggacgtcaagtcggcgtttctaaacggcgacttgaaggaggaggtctacgtgcaccagccgccgggatttgtgatccccggcaaggagggcaaggtgctacgcctgcacaaggccctctacggcttgcggcaggcaccgagggcgtggaatgccaagttggattccacgctcaaggggatgggcttcgagcaaagcccgcacgaggcggccatctaccggcggggcattggaggaaatgccttgctggtgggtgtctacgtcgacgacttggtgatcaccggcaccaaggatgcggaggtcgcggcgttcaaggaggagatgaaggccactttccagatgagtgatctggggcctctctccttctacctggggatcgaagtgcaccaggacaactccgggatcacgcttcgacagaccgcctatgccaagcgcgtcgttgagctggctgggctcaccgattgcaacccagctctcactccgatggaggagagactgaagctgagccgcgacagcacggcggaggaggtggatgctacacagtaccgacgtcttgtggggagccttcgctacctcacccacacacggccggacttggccttctccgtcggctacgtcagtcggtttatgcagcgaccgacgacggagcaccagcaggccgtgaagaggatcatccgctacgttgcggggactctcgaccacggtctctactacccgaggtgtcctggcaaggcacacttcgtcgggtacagcgacagcgaccacgccggcgacattgacaccagcaagagcacgagcgggattctcttcttcctcggcgagtgcctcgttagctggcagtcaatcaagcagcaggtggtggccctgtccagctgcgaggccgagtacatggcggcatccgccgcttcgacccaggcgctctggcttgctcgactgcttagtgatctcctcggcagagatactggagcggtggagctcagggtggatagcaagtccgctctggccctggcaaagaaccccgtttttcacgaacggagcaagcacatccgggtgaggtaccatttcatccgaagctacttggaggaagggagcatcaaggcgagctacattaacaccaaggaccagcttgcggatttgctcaccaaaccccttgggaggatcaagttccttgagctttgctcccggatcgggatggctcaactttcccacaagacggcgcacaagacttagggggagaatgtaggaataagtcttggctggttggtcttggtcttgtggtgcctttttcctgcttttcagctttctaggacagcatctctttctaggacagcatctctactttcagtttgagatgctctaggacagtttgttgggatgctctgctctaggacagtttgttgggatgctctaggacagcaccctcttagactagcatggctgcatggctgctacaagcagctataaatatgtatccaatcctttttgggaggatatggcttttgtgtttagtgaatgaagaaaaccagaaaattgccccatctcgagtgccatcctcttctcaatgagagtaaccattgaaattctaacagttacactttgcagcaaaacctccaatccattacccttacacagatttagaaaggtggtattatcagggttgaagtagccttcggagtttgatgggcacataagaaagaataacagacatatcatatttgttgcctcctggtggctagagctggccagcacaaataaagaaaaatgtactggaaataaaaagggaaatgcaaaatagtaggaaaatgaaaaatattcaagttcataattctgtttaatcattatgcaattaagctcatcttaatcttattgaccatccatatttttatgaaatataaatgcacgggactagtttatcgtgtaattttgttaggaaatttgggtttgaatcagtggaaatgtctgaattagtgcaccactcaaggttatccttgtatcccctgtgctttagcggttattaacttgagtaagtggcaaatacattctttatgttttgctcccatattgctgatttcacttaatttgtcctctctgttctttgggcgattctatttattttctattaccgagtcaaaaagaaatcagtttgagaagcaatgtacgtcttctcctgctgcctgattattaaaaattggatttctaggatgtatttatgaacatcttgtgagactttgtaattttctgaatattttataggtttgggagctcacagcaaataacattattatggtatcagctattggaaatgatggccctctttatggcacgctaaataacccggctgatcagagtgacgtcattggtgttggtggtattgattacaataaccatatagcttcattttcctctcgaggcatgactacttgggagcttcctcatgggtacattgttcaacttaccagtacactattttcttagtctgtcactgactgttgtttttttccgatatctggatcctgtaggcttgaaaagctaaagctttgtatcatttcattagaacagagtgtacagtatataaaacctgtaagcctagttcagtggttttgtatatattatcttaaaaaaatttgatggagtttggagtacttacattcgacttatccttatatattatgttgataaaggtcattgctaggtttgtgcttaccaaacttggcactgcaagtgcacacaaaagatggtcatatgctaattctttttaatcacatactagcaggtcaagtagaattacgtcttactgatgttggtatcacataaagcttttttacaagaatttctcctgagaacttttgtaaatcatattcgataattttattgtagttgaaaatcagattgtttgtgatattaaatttatggcaagaaactatttcctgccccttgaactttaggcatttaattaatatctgtagtaaaaacttgaaatgatgaggcaattttttttggggggggggggggggggtagcgatgatcatttttttacaatgccatagtaccatcttctcttgtgctagcttcacagatccttgaattggcttactcataaggtgtggtttcaataatgcaggtatggccgtgttaaacctgatgttgttgcgtatagtcgtgatataatgggttcaaagatcagcacaggttgtaaaaccctttcaggcaccagtgttgcaagcccggtggttgctggtgtagtatgcttgcttgttagtgttataccagaggagcatcggaaatccatccttaaccctgcaacaatgaaacaagcccttgtagagggtgcttctaggctttcaggaccaaacatgtatgagcagggcgctggcaagattgacctgtaagtttcttgtcccttttaatgtactctttggtatgcctatgattagttggatattcaatacttcttgtatcccatcctttccaaacagcaaggtttgtccttcaaaatttagaggcagtatatcctgtcaagttggtttgcccttctttctattgtgtgctcaaacagatactcatttattgttttgtctttttccagctggcaatcatacgaaatcttgaaaagttaccaaccgcgtgcaagcatctttcctaatacccttgacttcactgattgtccctatttctggcctttttgccgccaacctctgtatgctggagctatgccagtggtcttcaatgctacaattctgaacgggatgggggtgattggttatgttaaggatcctcctgtatggcagccctctgaggatgtcggcaatattcttagtgttcacttcacctactcagatgtcatatggccttggacaggttatcttgccctgcacttacaagttaaagatgaaggatctcagttttcaggcataatcagtggcaaggtcacattgtcaatttacagcccagcagcccatggggaaagcagtccacgaagtagttcatgtgttctttacctgaaggtcaaggtggtgccaacacctgttaggtccagaagaatattgtgggaccaatttcataatatcaaatacccatctggttttgttccaagagattcacttaatgtgcataatgatatccttgactggcatggcgatcacttgcacacgaattttcatatactgttcaacatgctgagagatgcaggatactacattgagacccttggatctccacttacctgctttgatgctagcaattatgggacactgcttatggttgaccttgaggatgagtacttcagtgaggagattcagaaacttaaggatgatgttgtacacaaagggcttggcgttgttgtttttgcagagtggtatcatgtcgacacaatggttaagatgacattctttgatgaaaatacacgcagttggtggactccaattactgggggtgcaaatgttcctgcacttaatgaacttttggcaccatttggcattgcttttggggacaaagtactaagtggtgacttctcaatcaatggtgagcagacccactatgcttctgggactgatatagtgcaattcccagcaggaggttttttgcatagcttccaactccaggacaactctaaaatttctcaggataactcaagaagcgcagatacacaaaataccccagataaaagcaaggttagtatctattgcgcactatttcacattatttatctattttcttgaaatgcattctttcaaaatgatggtgtggccattacaatatttctacttgagcaagaacctaatgatgcactataggttgaatagttgtaatatgccatttgatggaggcatgcctggtcatttctcatgaaactgttccctagatttggtgcctttgtgtcagtgcctcctagtctgtggctctgtgcacatggtattatgattggtaggcaggttttttcaggaatatcaagttctgagctaaccaatggatggtggtcatgcttaacttgtaataatagtctcttgaactttcatgcaagattttgttggccatataagttgcaagtgttagattcttactaaaatcagttattccaaaacttaacttttatttatgagagcccatcaaaagctacgattaggcaaaatatgtaactttccaattgtgaagtttggacccttttatgaccagaattttctcatgtgccatactctgaactgttttttcttatggacatagatagtgatttaaattcagtaaaaggaggatactaatgagtgttctggccagttcattatgctggtagatactccctccgtcccaatatgtagcaacctaggatgggtctaatcccatcctaggttaacatattgggatggaggtgtaataatttgatatttgttttgatcgcaccattttatcatagcccttattttacagtatataatacttgctgtataggtatagtaaggcttatttgcttctccttggcagctctcttctattcttggaatgatggaagcaggcaaaggtcgggttgcagtctatggagattcaaattgccttgacagtagtcacatggtaacaaactgctattggcttttgagaaaacttgtggagttcactggcaatagaatcaaagatcctgttcttttctcagaatctgctcagttaaaatttccagtttttgagagcatccatcaactgtcacgtagaccagatgtgaacttctcaacatattcaactgtcgttggcaatgaattgatctgtcaccaggattcccgatttgaggtttggggaacgaaaggttatggtacccaacaaacaggcacaacaagaaagttgccagagtaccagaaaagtgaagcttacaacatttcaacaccaatagcttctgacagcacaccagatgaagctggcctgcaaagaaatatttcaacaccaatagcttctaagtttgataaaagaatggactattttggttttctcgggcacgaagaggtatcctgtcttgccttcctctttgtagtggctaacatttgttaagttagcatattgcacttgatcaagcaataactctagtttcttacattttctcagaattct

SEQ ID NO: 502 - DNA, 16450 bp, Oryza sativa
  misc_feature (1)..(16450): CLB6133.4 (OsMADS6)
  misc_feature (11959)..(11961): m is a or c
  misc_feature (11968)..(11968): r is a or g
  misc_feature (13320)..(13320): y is c or t
  misc_feature (16044)..(16044): k is g or t
  misc_feature (16447)..(16447): y is c or t
cgttacaagttcgtcactgctatctgtgtcccaatcccaaccgtccatctctatccatgtgctagtggctccatcaatgcaactaacggacgtgtcctctctcgtccacactaggactagccaatgtggtttacaaccgtcaagcgctgacttgttcttcgatcgtcttcatctcggatagcgcctgtcaactgtatgattgaacatggacatacggttgcgaattactccgtatagtacccttgagtctcgctctgaaccactagtgcctggtggactccgtcacgcagtgagcatcggggaaaaaaaaagcaaaacatgactccacttccgtgctgtactctggtgaggcgagaaaagtcgaaaaccgcatagcaagttgtacaagtgtattattagtaggagtaaacaacacaagcaacagtatggagtagaagcacctacgaattttccgtctgaccagcgagcccgtcatccgtctttgccgcgccggggaccccacgcccactcgccctcgcccaaatcaagtttcggcgtgcgtttcccatgtgcccccacgcccgtagtccgtgcgcacgtaccagggcggcgggggcaccaccccggtcaaactcaaacgaactcaaaacaacccgcgacgttgtcccgttacgcgtcagcttgccacgccacgcggttaaaacgtacggcaagcgcgcctctggttccttccgcacgccgcacgcgcgttatccaccaaaaaccacgtgaaaacgtctcggtatcgatcacctcaccacaccgcccgcgaggccgcgaccgccgaccggcgcccatcaccgctggcgctctatataagcgcgcgcgctcgtaacgactagtcgtcactcgtcaccatcctccccctttgctttccacgactctctttcgccgcagtctctgcttccgtgcatccatcggcgttcggcgactcggtgtatagtagtattgccaactgtgcgtagcaagctcgatacagcggcgatcatggggttccctctggtgtgctactgcatggcgatcccaagccgctcatcgccttggccaagctcctcgccgccatcagggaggccctccagctgatgctcttcgtcgtcgggatctgccaccacccggagcgatcgggccgcccggctgccgtcgacgccccgctgcccgacgaggtgaaggaccgcctcccgcccctcgagttcgcccagctgctcgcggcctcggagcacggctgtcatggctgcgacgacgacgaggcggtggcggggtgcatcgtgtgcctggagaggctggaggcggatgacgtggtgcggcggctgggcaactgcgcgcacgcgttccaccgcggctgcatcgaccggtggatcgacctcggccggttgacgtgcccgctgtgccgctccaccctgctgccgcgcgcgcgccccgccgccggcccgcgcgggcgactgggccgcctcgccacccgcctcacgggcgtcgtttggtgaatcaatatttggcccgcgcgaccgcgacgcgacacgggatcggttgggtgggagggcagtcgcgccatttcacagcctaagctagcttactgctgctgttaatcaacggagacaaagctctctttccctttcgtttcctttttctttttctgccgaggattatccagctggaggagagtggtacgtgtcggaatgcggtggaatatatcgatgattagacggtaggaacaattaattagaagcaggcaagcagctggttggttggcccggcctggcacctggcatgatcattgggaggttcatgtaattactgcgatgattagatactgcatgtaagtaaatcatgtcatagagataatacacctgtgtacagtggtataatgataaacggttcatttggtatgtctctgtttttctggtccggtattgggtttttcaatgtttgcaaattgaacctttatggttatactagtacgtcactgaaccgagagctgaactggtccattttgcatatataatttattgatccacttgatcatgatgcatgattgtgtatcaactggaatgtctttatgattttgtaggactgggatcatttgtcctatacagaagctcctagctagtcgttgcaaaactaatgtgtggaatattccaaatttgcctctttatccttccacagttctaaatgtggaaggaacagggcatatatctatttcgagtcagctacactcatatttctgaactttcggtgtaaatttcgagtataacttttttaaattaagtgcgactcaattacttctctctgattttcaattgttgacgtgtggacccgctacataaggaacccggccatatatcagtaatgagtaatccacgttagagagaagctagatgatcttaatccctcctcgttcttagtactttgttatttaattattgactgtgttcgaagtaaacaaacaaacggcccaagataagctgactgaattgactggtcccgttcttttctttaataagagttggatgaaaaattaagattttcgtggcacgttttttaaactactaaacgatgtgttttgtgcgaaaattttctatatgaaagttgctctaaaatatcatattaatatatttttcaagttcgtaataattaaaactcaatcaatcatacgttaataccatctcgttttgcataaaaaacttaaccttaggtggtgttgaatctcctgaaaatgaagatgaagataaagattaagtgtttcacgcaaaatgaggtggtaataacgtgtgattaattgagttttaattattacaaacttaaaaaatggagtaatatgatattttagagcaactttcatatagaaagttttcgcacaaaacacatcgtttagtagtttaaaaagcgtgccacgagaatccaaaattttatcctacccttgcagaagaaacaaacggggcatcttcaggagaaaagaacacagccttgaaagcacattggcatcaaatttaacctttaaaaagcaaatagtctagcttacctgctaaggtcctttataatgaacctgtgtatcgagtttaagtatcacacttagtacatatggttgttcgtatttacggttaattgttctttaagttgttagcaatgtacttgtcaacaacgaggctcctacgataactttatcattcttatgatatacactcatagttagaagcacggtgtgcatgagtgttcataaggacaaatatataagtgtatacgagtgtttttgtatttgcgtctattatatgtttaaataaaatatcacctaaataaatatgaatatagtacgtatttaactagaccagcagtttgaattaaatctactactagtatgtacttgcgccattaactggattcttccaacgttcttctctcaccttgaacgaaagtacattcatcaatatcagcaacaccaatcattttcggccatgatcagatggccctgcgtgcctgttgagccaccttcccttgtgagataaaggctacagcttcagcaatctacagaaactgaaggaaaaaattctgtataatattgaatgcatatgtacgtaccaatcaattgatgagtgcacatgacatcctacttgattaattatggggttatggcaaattcgatcagattcctttattcaatagtacaattagtttgcacccataccgttacaaggaaaaaacgagatcatcttcatgcttctgattgtcatgtcattgtcattattcaataactaaacagtactagctggaatgaagttctggagataaacattgcatacatgttgtggtttcattgaaaaggggatgtcgatcaaaagtccaatatgttatatatgttatatatcgtcacaaattttcttgtaaccatgagttgttttggctatggttcacacgcactatatagtttgtatataaaaataaatattttacaaatttgtgtgctagattataaccgcgcctcacaatttcatgaatcgtcaaagtgattactctaaaaaaatattaatagaaaatccaagaattgaagtcacatattggatggtgatactaaatcagaaaaataaaacaaattagatgctgatcataccttcatgtgtgtcaagcatgtgaaagattgctacacaacgaggattagaaggctgatgccattgtgtaatgaatggaggagagctgtgacaaggtgacaaaagaggctagcaactgggtgagatcacaatggggctaacggttgtgaggattatggttggggaaggatggtagaggaatggtttcatatatatacaccacaaaaagattccaaacataaatcgttttcaacttttgcacaagaactaaaatagtaattaaattaatgtatgttacaatccattcatgagagtgatacaatgtattacctttgttttagattataatttgttttgactttggttaaagtcaaactattttaaattcgaccaaatttataaacaaatttagtaatacttgcaataccaaattaatttaattaaatctataattcaatatgtttttataatatatttgtcttgtgttgaatatgttactacttttatctacaaacttggttaaacttgaaacagtttaactttgactaaagttaaaacaacttataatctgaaatagagggagtacatatttagagtaattttacagttattgagtaagtactgggattttagtgtaaaattttgtacttctcgatacactacctcagtttcaggttataagactttcaagcattgtccacattcatatataaacggagaaagtactaaattttggtattaaaaaaatttgatacctcttgatacattttaagtgatgtaaaatttctcatgtatttaacaagggcaacaataagaaaaaactaaaaattgtcttaaatatcctagagtgacttgtatattatgaaagtttaccattcaacatttggtactggaggtaccataaattttgatatcccaaaatattttctagtataaaatttggtattggatggtaaaattggctcttatactaaagatgtgattttggaaagaaatcatccataacacatcatctaaaatgaaaccgttgtcgtcggtcacatatgctatatagagtacgtaataaacagtttacccaaagctggtaagattattttcaaacaagatccaaatcaaaacataaaaaggtagcacggaaacacaaccacggacgcagaaggtgcaaacagctagcagtagcttacacacaaaaacatacagattaaagggccacgcaagaccattaggtggctcgcagagagatccgagatacatgtagcccactccacatcccttttattattagctccaacttctgacagctgatcgatggctgcttagctcaaagaacccatcccagcatgaagttgttctctgcacctgcaggggcagtgctcctctgaatagtgtttgcttcagcaggcacaaattgatgaggatacctagtaacataatcgtttttcagataatataatggaagcaagatatacacagtcagtttgatgagaatctttcattagttctactagttcggatgctgtgatcgagctgtatgcatttgagctagaagttataagtatatgcatttctggtcttggcttttcttgattaatcttacccaatttgcaaggtgggttcagagtccatggccgcggagtgtggcggcggctgcacgtatgcggcgccattctccaccacggcgccctgagcccaggaggcttgctgcatggctctgtagttgctggtggaaccttcaacctcgagctgcagcattggatatgagaatatatgaatgaaaattatcaataaataattatatgtgcaccgcattggcataacagatttccgagtgaataagaaccttgtgcttgagttgcctattaatttcacccagctgacgctcctgtggcacaagaaaaatatattggagatagtataatatgtaacaactctcatgaaagaaatctctcgcaagaacgaagctaccatttctttagttatacagtcaaaggctacacgatctaccctaattaacttgcatgcggtataccctagcagccttgctggcaatatagatgcattgtcaaagctagccaagtcatttcgtggtttaatttagattatcactagtagctagcactcctgaagtcacccgcccatggcaatgctgatactgtatgtatgcttgagaaactttggattgataatgtacctttctgcgaagttcctccacttgttccatcatcagttgcgtctgcacaaaaaccattcaagcacagtcatattgagttgacagtaatataatgaagtgtagattatatccagtttctgaactttcatgtgttctacctagctatttcttgggatcttttatggtccttgggagattttgaagcatgtacgacgcaccacaaaatgaatactagtgtatatttaatctctctacctctatccttcaaagttctattttctttgggttattcacttattctttttttagcagctaaattttcctgaaactccagaattgaagccatattatttcatcagctactcattgtcattactatccttgttgacgggattgtcatgcagctttgaagtgttttattttgaaaagagtaaacatataattattaattagcctaaacaagcagccataagtagtagtatatctgaaattgacagtttagattaatgttgcagttgctcggccctgtcactacacatgtatccatataaagaaaaagggcatgcgtgctagccattctatatttctattctatacttagatagtcttttatatgaaatttagtgccactgtatgcatcaccttcgtgcctagaatagggtgaatttatcaagatacatgctacgcccagttgcttcaaattacttgtcattctacgtttgtcctaattcaaacacttatatatatttttgaccattagtttctaaaaaaatgatactatagtttaacaccacaagggttatgttgttagatacacaacatgaaaaatccttacagaatgtacagttcacattttgttaaactacacaaatttccagaaattgatggttaaagataatgacttagggcaaatttatgaaacaaagggattacttatgctgcatagtagctttcacacttctttaaaaatatcatcagttgacctttaccataaaataaggtatcaatattctaagtgaaatatgtcttggctttctaccaaaccaccaccatgcattagctagagattgaaacaattttagcaattctctttagataatgtaggataagcattcccagttattatgttcacttccatgaacaaaaacaaattagttaggtgctctttatataaactttagcaaggggatattccatagctagcgtacacctcctgtctatttataaatatatataactttacctacaaactaaagacatactgtatattttattgcttctcacgtattgcacctatatccaaatcagtggacaaataacaagcgaaccagggtaggctagaaacagaagtattttggttccaaacaaaggactgcagaatgccataaacctttctctgtctcgcctgtgatagtgcacattcaagctgtttctccagctgctgcaattctttgacgctgagtggtccaagatcctccccaagcaagtgcctttaagaatcaagcaaaacccaaagagcataatgtaaatattaaggtaaattgcatgacacataaagtttcgcagcagctatattacagaataatgtgtgtaaatgcacgttatgggctgcttcttccctctttcccttaacacaacattatcacttgcatgcatgttatagaaaaatatattgtgtatttgcaggagttatgcttcttggagagatcatagtgaaatacctttgagtgcgctgcaaagcttcaaattttgctttcaactttgacatttcatggtaccaactcttcaggatcagaggaaaagaaaaaccattagttcagttcacaaaaatatttatcagctagttctaacgactaaggaactgtgtgtttggcgaatcatacactgaatattagtgttacacagagcaaattaactttctgcggtttctttaaacacttgataaaagtcgtttgtgaattttaactaaatatgtcacatggcctccttgtacatatacgttgggcttattctttttttaaaattttgtgaaacatgctattaatgatacagctagcaaactatatatactgattattgggcaaataagttgcaggatgtcaatgatataaatataaccaagtgacataactccttagatattttgcggttggtaagttctcaagaatttcaatttgatctcatgacttttgaaattatgcacaagggcatctatgtttttgtttgaaatgttatgaggacgtactctaattgattgactgaaatttagaatcaccataaagagtactccctccgtcccacgaaaaaccaacctaggctgtgtttagttccacgccaaaattggaagtttgaagatattggaacgatgtgacggaaaagttggaagtttgtatgtaggaaagttcgatgtgacggaaaagttaaaagtttgaaaaaaaaattggaatctaaacagggccctagtactggatgtgacatatcctagtccaatgaatctggacgtaccctgactgagggagtactatctggtcacagaggtacacccttatttttttgggatgtgcactattgttgtacattcaatcaccatctatatttaaatattgaactacatcgactaatttacttcatactggtggctgtattttagcctagctaggagtatatttgtatattcgtcgatgcagggaatatatacttcatattcgatgcagggaatacttcatgtaaggttacactagggagctaggggcacaaaaagtcatttagactagctatttgtatattctatgctggtaaaaacctatactaggtgcaacatttctgaatacatatacgccgtaaacagcacgatcttgcattgtaatatggtataattataacaaacaactagtttgataccccgcgcgttgctacgggattttatggtgatgataaacaactttgtaaatatgtgcttacaaacagaattgaagaattgaaatatcaaaagtaaacattctaaaataataaagtgtaaagttggcatttgagtggtagatggttaagggatatagcagtggcttaatatgggggatgcatgtaatgcatgaccaggagcacttaagtgggtcatccattgatgtgcctaattacccatggcagtttccttacttaaggcatgcacagttaaacaaacaaagatgcatttgatccgacggctattgattatcgatgatgtggcttaacctggatgcttctttatagtgttaatgcttgtagtgggtaccaactatataggaagaagggattgtctttgttgtcctcctttgacatgtcaataaaaacttcatttattacataaaatatggttaatgcatgccggtgttgaaattctactagtttaattcttctaaactttgccattctttagaatgcttttacgaaaagaacatccgatttagtagctgtgtcaagtaaaatattttaagtcactgcaaattagctttgggatacatcatcaaattaacacagttatgctaatctgtgtactttttattgaatgtaatctcacaatacgatgaaaatacctagctaggtttatactgtagctaatttcaatgtcaggacattgataattgcatattcatacaaaaatatatatagtaaaaaaacaagacccattttgaaaccaaaaccaacagcagaaattcatgaccagttcatgcagatatatatacctgggtttcagaaagtgcattgttggaatcttgagcattgtagcaacaatgttggtacctttctaaagtctttgttatgctgcacaaaaatgttatatgtaaatttctcatatatcaaattactacgacgtaaaaagtgcatagatgttatttatagaggcagaagcttatattataatgatatcaaaggtcactctatatttactatttcttttcgtccaacaaaatgatcatgttttttttggcaaaacatagtatgtaagaacgtaaaaaaaaaacatagaaatgttacttgtagagccagaagcttatattataactcttgatttatgacatagataatttttttcatccaacaaactgatcacatgtgttttgataaaacatgcagtcagctttcatcgttgaagtggctttgtgtgagatatcacgaagtgactttgtgttgcatttatagattgataaaattattggttacaataactaggttttactacctccgccctaaattagtggttgctttaactttttcttgtaacatttgaccattcatcttatttgaaaaattagtgcacttataaaaaaagataagtcatatttgaaatacttttgataataaagtaaatcacaaacaaaataaataataatacgataatttttttaaataagataaataaccaaacgttaaaagaataactgaaagcgacaagtatttaaaagtgatcgatgtgtagagacacacacaaatctaggcgaatgctttgtaaaccataaacaagaagcttgtgaacaacacaattaatggtccaaggcataaactgattagtggtgtgaagaaggaaaagatggtccgaggtataaacaataattgattagtgtcccaattgcttcaagaagtatagacccttgactattcagggaaaaaaaagactttcctgacggtcaaaacacaggcgcgccgactccaattcaaaacgaacacatgcatgattttacagaaggaaatcaaggtctgtttcttatacaaatacatgttagatcgtctggttagttgaagtgataacaacagctttttcatgcatgaaaagatcatctcaaatgcctggtgaatataggctttatcttataatggtcaaaacagattgaaacatattaaatatatactcgaaaaagaatagactgaaaaatatcaaatctttttcaatgaaacagttggatgcatacatagttaaattcaggcgcgcgcgcgcgcacatatatatatatatgcatatagcatctaattaacccttcagttgattttccctattgtatgattttcacaatcaaagatgtggattggatcttgaaaagttataatgttatccacataaactctatacttagcgggaaatatgccaaaaacaaaacaaaagagctagattttacatataaacatgtgagtgcagattataaaaaatcccccttatcaaggaaaaaatgtcatcacgaataaatagagaaattaccctgttaagctcccttttttcataataagtaaaacttttcgtgcaccattttagatctgtcacaaacgtacccaccaactaggcaaataatgaaaagatctccaagttgagctagtacgaaacaactaggagtcaagcaacatccatgattagtaaagaataaagaatggtttaagccgtagtaggaatcgtcatgaaatgaggagaaagaagagcaaagatcaaatatagacaattttggccacaccaccacaagcgaaacagatgcaggcctgacatcaagtgttgatatatagaaaatccattcaacatatttccggttgaacttacatacagtcaaattgagaatgcatcatgctataactgacagatcaaaatgatcaagccaagatgaggaagaagatagamcmagagaarggggggggggaaataaggtgatggcatcagaactcaaagtatgaagacctcccgagcaaaaatagatctaattaaatttcttccagtatatatggaagtagaaaacacgaattaaatttgattcatgctgagaaacatggcatgagatccgaaggaagtggaaagctaggagaagggtgatgaagaacaatgaaattgatcagttcatagcatggggaggtgagggtaagaccaaaatggagcggtgctacgctgctacgccgattcttccagggtcatcacaaagtatgaaaatcaatgtgccggaaagatcttaataccagaaggggctcccctgatggatcaaaaaggaaagaacataccttcctttctagtttgcagccttcatgctaactctccactcagttctcacacacaacacaccctctctagtactggttttgagaaatttatcgttcgagctgtctctgacacacgcacaacccggaagatgggcaataataatccaaggaagacccggagaaactggaagaaagaggtcagcaggagtagggtttgtatagatccgctgaaaagatatcctcccatgctagttagggatccggcctcccggtttataagaacaccgcgccatgtccctatagtagtatgcacagacacacacagacagacggaataaaataattaacatggccaggtaagtatagtagctcggctacttggcacctgctaaaaataaatgaaaaagaaaacgagaaaccccagaggagcaggacgccgttgcagcagataaaagaaacaaaaaagaacaaaaaaaaagaagcaattgatcagagaaaacagcagatctgcaggttcaaattgatgctggtttgttggttgtgtgtgttgttgtgtctgtattaattatacccggcgctgccgaactcgtagagcttgccgcggctggagaagatgatgagcgcgacctcggcgtcgcagagaacggacagctcgtaggccttcttgaggaggccgttgcggcgcttggagaaggtgacctgcctgttgatcttgttctcgatgcgcttcagctcaactcttcccctccccatctcgcccgatcgatcgaacgattcctcagctcagcaccgatcagcaagcacaggctagctagctcctcctccaccaccaccaccactgcctctcttcttgcttgctaaagcctccaatgatgacgagaatataacgagccgcgcgagaagaggagaatattagtggagtcgagtccggagaaaggacattgggcactgtaccacagtagtacactagtactagtagtagctctttgtgaaactggtttcttgcttgctttgacacacatctctctttctatctctctctctctccctccatcacaattcacacacctyctctccctttcaacaataaagaagggtaactttggcgtggggctagcaagtttaccacaggttttaccctaactgggaagcacgagccaaaatgggggcaatccaatgccacacccgccacaccacaaatatacaccgttgcgatgatgcatatatgcatatacacgaggaagatggccaaaggaggggagagggctactcccagactcacagtctctctctcttgcgcgcgcacacacactgctctcctagacttaacccaaaccatgtatgtcgccacctactggtccaatggaccacggcaccgtccggtagaggctgcccaaaaataaagaagcagggaggggaggcttaaggattgttttgccagcatctgtgctttatccaataatccagtttgcctttgggtgcatatgcatggtagagctaggtagtagtagtacttgtattattctcctctccccatatctttgacaaattccagttgccgggcatactgctcatgcatgattaatgtttttcctttccctttttttctctttttgtttttttgcgtagctaggctcgatctactgcacggttccaacatatattgctgcaggtacttcttgtgacttgtttagtaaaaagaattgcgtaaatatcatttgtttcattgtaactaattttatcattgaaggtatatatatttgcgcaaactatctaaataagatacatggttaaatatatgaccaaaagtcaataggatcgtatatttaaaaacagaagtagtaataaagaaggctaactttgcacgacaaagaaaattgcaaaatgatccccatttatagaaaaatccattgagcttgtgctctcaagcttactaataatgtaatcaacaaaacctgtgaattaattaagtcatgcaatagattggcactggtagatatttcaagagtaatattcagcaagggaccacatgcatatgatgcacagaattgaaatgacatctcaatgtacttgtgcatcagcaagggaccatatgatgtttgccctagctagttcacaaatcctgtgtctattcccggtcgtttctttattttttttatttgatgcattttaagtgggaaattcattttaatattttttcctcatgttttcttcgtgttcccacatcacaccatcgtcctagaaaccgtcccaacctttgacatcctttaagccacccactggtcatggtggaggcaattaacaggaggccagacatcctctgccggccaatggccaccttctttcaatctccaccagttggataagagttcgcaccacctctagcagcaatggtcgtccgaggtcgtcaacacatcattgcaggggagccgttggcttcctcaagtagccccatgagcacactgtcactatgatccactgtgccagatcctaccggcagagacgagaatgcgatcagggtggtggtcaagctaggaggataagtcggtagacacggggatatgggtagcgtggtaccaacaatggagcgtggtatgcgtatgctaccgtgctcatcacttgggggacgacaccgccccgatgaactggataccccaggtgcatttctgtcttttcatttgcacatgtgccttctgcgccctcatccattcaaaaaaatataaaataatggggagggcgatctctaccatgaaatcaattactacatctcaaagtctccctccaaaagttaaatatattgtgaggtgctaactaaaattaaccacacaatgatgatgtactttagcaaaatttgctagaaagaacggtatagctcttggcaacaaggatcattaaatctctcataaaaataatattcattttctttccgttaatttcttttttatcatctctctccagacaattcattttttttacaacagcaccggagagaaagtttaaatgaattacactgcaaatgatatccaaattaactatccatatcgtctataatcagttaactgaaacaacatatgatgatttgttagcatgcccattatatataagactttgcaatgtcacgactagataaaccatggaaaatccacaacttaaaacattctaacttgtagttagaacatttattaacattacccgagctaccatcatgttagatagaatcctttatataccactgaaaatcagtctgatcccttatataccactgaaaattggttcatcccctatatgccattggtccaaaattgcgcaccctatcatgcaacttccatcagttgactgtgttgaccgttaactctaaagtaaaaaagacacatttgcccttcttgagttgttaggcatgtcctatactcagaaaggcaaatacgtcttttttacttgagagttaacagtcaacccacagacaacagacgagagtggcataagagagtgcgcaaatttggtccaatgacatataaggacatagccaattttcagtggcatataagagattctctcgtcatgttacagtgtgcaccaacaagattgaacttgtcaagttaaaattatttttaactagtgttttaaaacatttttaagaaaacttttatacgtgtacattctccctagcaaaagaacttgtgaccgagatttttcattaaaattttattctgattgttagcgtagtgatggggatgtatatatggtttaaccctgtggacctatgttcgatttttgacatgcccacactttattttkgattatttgagatgcactttcaagtgtgtagttgtaggtgtgtatggttttaacccagatgtaggtcccgctcaattctcaacaagttcactctccgtccttaattattcttgtccgggtagcttttttttataatggcgaggtacattaattcaaaaaatgcaaaccactattatattacttgtgtacaatgataggcttttcgcaagactctactttattggactatagctcatatggtactcatcaactcaggttttcagtgatttacaagttgtatgcaggtctttttcattctttgttgtagaacatgcatgtgatcgaacaggctctttcagagaggagagagagagagagagagggagagaggggggggggggaaacctgccctaaaatgcccttycct

SEQ ID NO: 503 - DNA, 9400 bp, Oryza sativa
  misc_feature (1)..(9400): CL002227.118 (OsMADS8)
  misc_feature (1)..(9400): n is a, c, g, or t
  misc_feature (10)..(10): m is a or c
  misc_feature (3500)..(3500): y is c or t
  misc_feature (6440)..(3440): k is g or t
  misc_feature (6534)..(6534): k is g or t
cccccccccmaaannaaaaaatcatatataccctaaaaaaaattgcccctcaaaaaactaaaaattgaggaaaaaaacagatcccaagggaattcgaaactcgcataccctccattaggagatcgataaaattaagattcgaagcttccaacgattaattttctccgtaaaaatcgacttgctgatccaggcttaaatcctgaatgtcccatcccatgcatgcacataaattaatcgcaattaaaccaaactcaaaaccattaagcgcgccatctcaaaaccactactaccacgggatcagaaaccctcagatctacgtatttcaccactccctattacgctagctagcacccgatcgaacgaacaaaaaccctaattattcccacagaattccaccaacttccttctcccaaaccctcccaaaactcaccaaaacacgagcacactcgcagatccaccatgtgcagccccagatccccgcaaaatcgccaccaagaagttcacaaaaccatcgtgcgctccagatctggaggcgcaggcgcgcgcaagaaaccctagctagctacgttgcaagcagctaccgatctagctatagcagatcgaggcgcgcgcccagtgcgtccatgtatatatacctttggccgctgcagaactcgtagagcttgccgcggttggagaagatgatgagggcgacctcggcgtcgcagagcacggagagctcgtacgccttcttgagcagcccattcctccgcttcgcgaacgtcacctgcctgttgatcttgttctcgatcctcttcagctccaccctccctctccccatcccgatctcctcctcctcctcctcctccacctcacctcaccgccgctcgagctcgatcaatcgcgagatgaatcaaccaatctcgcgaagcgaaagagaggggaaagctaaggcgaggaggaggaggaggagggggaaggggatgaggggtttaaaaagggaaagggggagagggtgggcagcggcggtgggggctacccggcattgccatttccggcaaggtggtggaacgacgcggaaccctaggcggcctcgatcgatccatcgtacgcaaaggcaaagctatctaggttaatttcgcactaatctccgacccaattcaatgcgtctctcactgattgctttggattttctctctctctctctctctctctctctctcctcgtcgacgcagcggtggcgactgaggattcgacaggtcgagaaattaagcgcggaaaagctggggaaaagtgagtagagttgggcgcttttgcacttgaaacctcggagttttcgggtttcgggaaaaatacccttcttgtgtccactaggagccggtgggtgatctgttgggagagcttaaggctttgtttagtttccaaaataaacaattttcacccatcacatcgaatatttaaatacatgcatggagtattaaatgtggaaaaaaaaccagttacacaatttgcgtgtaaattacgagacgaatcttttaagtctaattgcgcctgatttgacaatgtggtgctgcagtaaacatttgctaatgacggattaattgagctcaataaatttgtcttgcagttttttgacggaatctgtaatttgttttgttattgtaccacatttaatactaatgtgtgtccgtatatccaatgtgacaaacaaacccaaaaattttccccaactaaataaggcctaagattttgggaaatagctagttagtatcaagcttctgagaatatggagaatgtggatttctcagcttctgttttctagttaattttttagattctataattagagcttttgagaatttggatgaaaaactagactatgtagagaggattaatatgattttgagagaagatacagcggtcagaaaatccccatacagacccttacaacttttctcttgggttgcagttgcaaatcaaagcagcaaaatgaaccaaggtagcatagtatatatctagctagctagcgatgtggttgccaagttgccatagttcgtgtagacaaaatggagctgtttgggtttggatagagagaggcttcttcgatcggtatatctctttgcctgcagagaactttgccgttgcagtgcttgcagtagtagatatatatgtgtgtgtaaggtttgaagtcttggctaggcaggagtgtatgttctttcattttacctaattggtcgtgattctgaagagatcgatatatattctacctgggatatataggaactgatcaaaggattaatcattaatggtgtatgtaactttggtgtggtaacgtatcacagatgttaagtgcaaactagctagctagagatggacaaattaggctgcaggctaactaattttggttaagttaattagtatccatgcatgctgggaactcaaattagcaagagggggagatatatgaaaagcaaaataactagtatatgttataaaattaatgatgtattcatgttgtggttaatttaattaggggttgactgttggcacggggtgtccagtttataaaaagaaaagttaacatatgaatttgacatgtgctatgtatatgtgaaatgtcaatgaattaaaccgtccctgtaaactttttaaattgtggcttattcagcattataattttttttacctttttttctagtccaacatttcaaaggctgaccaagtttataaaaaaaacatactaacatttttaagataaaacaaacgtagtatctaaatatattcaatgttagattaaatgaaactaatttgatattttagatgttgctaattttttttataaacttgaaaaaaaaagtcaaatcaacttataatatgaaatgtagggagtagcgtgcaaagattacattaattttgaagtgcattgcaaattttgtgcttgtggatatatccggttcaatttatcaatacaataaagttgaatgttcaatatgtagtatcatttgcactttaaagcttagattaataagtatataatggtgcatgctaggtatatctatattatacatgcatgtttttcctcttaattacaactaatccgtacgtatacgcatgcagaaataaccccaacaaaattatgtacgatacagtagccaacccaatgtgttatataccacaattaacacggttcgtttgaaaactacaagctcaggtcagcttaggcatgccaggatttggcatttcgcaaaaaatggttggtcatcggtttgtgaaaaccgatcaatattagttggttttcgtacggtgttaaccaaaattcatcagtatttaacggttctcaatggatcggtttgcagtaaacgagtggaaggtggttctttatttcaaaaaaaaaaaggtaattaaacatgggtatgcaagactatcacatacggaataatagctcagcaaattgagccgttcttttcttcaaattcctcaatttcattagcacttttttcaaactatttaatggtgtgttyttttttaaaaaaattaaaaattctatatagatgttgtttgaaaaatcatttttaagtttataattattaatattaattaattatatgctaatgaaatttctcgtttcaagtgagcagaaaatttctctccaacttgaggatataagggcatccgcaatggttatctataggctctatacaagagatccatgtcatcatatttttctaattggaagaggttaaatgaagagaaagagagagagtaaagctttctactaacatggagatagtctatagagaaaaacgatgtaatggatgagagatctatagatacccatgtagacataatattgaggtggtttactattaatctagtctattactgagatgtacatgttttgttttatagaaagcaacttactttaccattgcgggtgttaaaaagctacaccacccacacccatcccccgcacgcaacaacatggttggtgcgcttgactagaccctgaagcccccgtcatcgcgtcgtcggcaggcacacctgcgagcccaacggtccggaccgggtgctcacgagatatctgcaggcaattttaatctgggctatatatatatatatatcgtcccatctcgcgcgcgacttgatcgatcggtgatcgcgaccggccggcgtgacggagtacgtacgacggacggacacgtaccgggtcgatcgatcggatgccatcatgccgcgatcgtcgatacgtaccgggcccatggtattcgtccgttcgatgtatcgtcgtacccaatgccatggacgcgcgacgaacgatcccggccgccggctgatccatggatggatcgatcgacgtgaggacgcggacccagagcagggagagagccgtgtgtgcgtgaaaaaatcccggtagattttggacggcaaaagccacgaaatggcttggctagcttgctagtactactccctccgtctcataatgatttatcctagaattacgaatctggacatatatagttcccatatagtccatatattaggttacaacgttatggaacggagggagtagtaggcagcttgaatgcttgatctatcggcgcgtcccgtccggcccggtgcctgcccacaaactactcgcgcttgcttgttgctgccttgcaatcaatccatcaatcaaacgtctcaacgatcaatcagttcaatcagtattatgtgtgtgtatgcgacgcagcgaccgtgtcgtgttgtgcttgtgcagttgtgcgccatttccattggcgtcatgtgactcatgtcacatgggcccaagacgacgacctaacgtgggctgcagatgggccgagttaattaccactggccgagaaaaagcccagacggaacagagctcctcctcctgctgcagtgctgccagtgaagtttctgtacaggaatttccatggaattctctgccgctatactcttttaatgaattaaatttgaaaatatagtgttcattcaattattttttgttagaaatatttaggatacagcacaaatataccatcggtctcgtacaaccattgtgcgaaaatgacgcataaatgatttcacgaccggtatcgtgcagtgaaagtgcgagaccgtgcggtctcgctcaagcaaacaacgataccgctcaaacaatcaacgctatcgctcaagcaaagagagatatcgtgccttgcctatttaattagcggttaattatactgattattaattaatcactaatcatgataattaatcactaattattattagttaattgttaattaagtacttgatcactaatcaaatggatcccattggacaatgtcacagatggcttctgcagtctcactcttccattccgcgagagaccgtgcggtctcgcgctttcgccgcgcgataccatccgtgatgttattcccgcgtcattttcgcgcaacggaagtgcgacaccgatgatatatttctgcataattttttgcatcccaaatattccttagaaaaaattgaatgaacggtacattttcaaatttaatttctcttttaatcaccggtgaatgtccacccgtttattgcatgtcatctaaattattattatttttttaaaaaataattgacaagatatgtaatatatcactacacaaacatgtaaattaaaatttaatttctacaaattgtaacataaacaacaaataaaactcaaagtagtgtatatatatttgcagttaaatttctcaattttgttacagcttgtaaaagttaaatttaatattacatgtttgtatagtgatatattacatattaatctatctagttaattttttaaaaataaatttataactatttagttgatatagttgatatgcaactaatggatggacgttcacccgatgattagaatcaatctccattctctgccaatttctgtgaaactttgctgctgctcagagaggtaaggtaactaaaacggaagcaccacaagaagagatcgaataacactgcacatcacaggtagtagtagtagttactaattacgggaggaacagctactgatactcttaactcttaatgataattactggggaaggctactaattaagctactgccacgagaatgggagcgacggcgacgtgccgtcggaggagccctcgccgccgacgtgaaacatgccgtggtagttcatctcgttctcgttggagcccggcaccagcacggcgttcagctgctgctgctgctgctgctcgctgtccatgctcgggcaggcgaacccgccgccggcgacggccgcggcggcgggcaactggcgaaccacggcgagctgccgccgaactgctgctgcaggttggggaccaacggctgcgccatggggatttggtggtggtggtggtgctcggctcccgccgccgccgccggtgacggctggaccatccggctgacgtcgacgctggaggakttggcccggggatgacagaagagagagagcacaatcggagtcgagcacttggtggtggtggtggtggtggttgggcggtggtcgtcgtcgttcktcgccgtcgtcagcccgtcggaggagaacatcttgttgctgctgctgctctccggtggcggcggcgcgacgacggtggtctggcacaccgagatctccagcgtcgccgccgccgccgcgccaccgccgccgccgaagcttatctgatcgccctcatggaggaacgggaaccgccggccttccttgggggagaacgccgccgtcgtcgccgacgacggcgagccgacgaaatgcggctgccggctggtcatcaccggatgagggtggtgatgatggctgtaatatggggtctcctcggatttgatgatcccaggccagcttggctctggtcttggaggagtgaaggacgcgaaccttgtccctacatttgaatacagaactaaaatggccgtcattaaaacaaatccgacgaaatgaaatctccattatgtaaaataaataaatgaatgaatgaaacaagccctagaacagctactaaattgttcggtgtggaagaagaaattcagtccgttgatttaactttaaagctccagttaatgtgggtatctggaatttcatctcagattccaattcttgaattaagtttgagtgattaactcaccatgcccactaaacacaataacccattcatatatgataataataataataaatctgacaatagtatcagaaaggtaaatatcaattgaaacataatactatgcacaacaagatataattttttttgctgttttaactgaaaacataagggttgcattgtgctctctaagctccatgtaatatataggcaaacctatcatcgatttacacaggaggaaactagtagaacttgcggaatacgtaagtatcaggtagattactgaacctcggttctacatgctacattttatgagcaattggggtataatttgcagtggcatattggtggagtctagatatacattactttttgtttgctttacagctcagatttctggtttaagcaagagaggacattacataatttattttcaactatgtcattagcattcaacatactcttcaaaacaacagtttttaaacaagaataccttgttgacttgtcataaagctgccagaactcatgctatctgcctgtggcttcctgcggcgtcgattgtgcccatccaagcgttttctacaactacgcttagcctcatcaaactccccaagcaagtgaaacctacagaaatgaaaagctatgatgagaattccaaacatcaaaatccttttttagtacttaataaatctttataaaacaaagcttgattgttatactaggaagtgaaagggaaaataaaatagagctgctttaatgctgaaaaggtagtgtgagttctaattgaagcaaaaacatattcagatgtacttgttttatctcagagataaataatacagtacatacgaatacttcaaaattaatggggctcagatgctatttaaaagaagaggaatgatacgtgtatttatttgctgaatattcaataatagcacccagcttcaattaaataaaatggtacacggctggaccaatcgtatttcaatgtgtcagctaataatttcaatgcatggggattcagttatataaaagttttgtactggcctgtcaagcacaagagaaaaaaaaacagtacaactttggcctctgggacatttggaccacggtataatggttccagcaggtatatggcagtatgcatcccaccagcctgttgcttcatgaggatcaccttttttttttgcaatgagcactgaggaatacttgataaagactggcaagcaatatggcattttaattttgctccactgggcatctgggagagggcaattaatcgttgcaaaggagtccccacaggatataaatttttcaggaggtggcgaatgattggctgataatatttgtactgtgttaaaggtaacatgatgcagaggtaatttgctcattatagctcaacaacgtaaaaggacatcacaaaaagtccacaactgaactagagatgaacctaatacaagatctcggcttgcgtagtatttttataaaataaaaaattgacaaattggaggcgcgcattagctccagagagtaggattcatatcggcagaaagtggaccacattatactcagttggtaagagtaagcattatgcttggaactaatttagaaaagcagctacagtagttgttatgtcctgaaggaaaaggattttcctttttttttttgtttgtggaagcaaatgattcagctggaaaaggacgaccatgctttaacaactgttttatttcagttcagtagtcaaataacaaggatgatgttcatattcctggaacaagatatactcttgaaaattaaatatagcttttactgtacagccaaatcggtcaaaatttcactgatatcttacccaaaaaatactgatcgaatttgaaaaggtgcacacaaaccaaccccaaaacacacaaaaaggggtaaggcaacctattgggtgtatttatctgatttgtaattagttaaccattgagtagacattggtatttgtaagggttatctggttgaatgcactatacagactgtagttagctttcaaacagcaaccttgttggtcccaacaacttaaataaagagcatagctaataacctgaagcaaagcaagccataatataaagcaggttgcatgttcaatatcatctttacaaatcaacagtccctcataataaatactgttgcacaaggatccacggaaaaaagtgaaataacttgtatggatctggtcactgattcagaaaggaaagatctaagcagaaaagggagctaggcaaacatgtcagaaatgggcctaatcaacccaggt

SEQ ID NO: 504 - DNA, 55786 bp, Oryza sativa
  misc_feature (1)..(55786): CLB17240.2 (OsMADS8)
  misc_feature (1)..(55786): k is g or t
  misc_feature (1)..(55786): m is a or c
  misc_feature (1)..(55786): r is a or g
  misc_feature (1)..(55786): s is c or t
  misc_feature (1)..(55786): v is a, c, or g
  misc_feature (1)..(55786): w is a or t
  misc_feature (1)..(55786): y is c or t
gagaaaataatctctttgttttttaataaatggtgctgatgacttctgaatatatgatcattcgttttattcaaaatttttatataaatgtataagatataaaacatgtttaaaatattttaagtgataaaataactaacaacaaaataaatttcaattaaataataataataataataataataataataataataataataataataataagacgacgaatggttaattgtgtaaccaagttaacgacatcatctattaaaaaacggaggtagtataccagtaccgctcgtgtataggtggtggccggtggtggctaaacaaccaacaatgaccatgatttaacgaaacaaggttgtgacttgtcccattgaggtgaagttgtaaccatacaccgatacacattcgcatgcctacttacaagagaaagtatataagtttaagagttaaacacaatggtcagatgaaagtttattacacatacatcttatcagatccaaaaattgaggtatatgtgccataacatatttattagtatcatgacttattaattatatttaaaccatagtattatcctctacgttttgctaaaagctatcggaatcgtcttacccgatcagcctagatccaccttgagcccttgatgcttatggttgtcttcaaatgtataaatttgttcctcaattagcactcatggtttgactgctagatataaggcgtatttgaaagaaatggattatagagtttaatttaattagcttagtcccttaacgatgttttggaaaagaaaaaagcaatgctagtgcgtaactgccatgacgtttttttccccatttacaataatactacataccttgacatttggcattggattaaataatcgttccaatagtctacatctatcaaatattcctcctttagttccacttgatctttcttaatttctacgtattttttcctaatcctatgagcctgtttagttggtgaaatgaaaatttttggatgttacatcggatgtttgaccggatgtcggaagggattttcggacacgaatgaaaaaaactaatttcataactcgcctgaaaaccgcgagacgaatcttttgagcctaattaagccgtcattagcacacgtgggctactgtagcacttaatggctaatcattgactaattaggctcaaaagattcgtctcgcgatttacatgcaaaatgtgtaattagtttttctttttatatatatttaatgcttcatacatgtgtacaaagattcgatgtgatgtttttacgaaaagttttggggaactaaacagggccaatgtagaggatttcgttttacattacccatattcataaactagaaatttccctggttagattttagagggggtttttttaagagaagggtatccactcttttagttccacttgatatttcttaacgatctcgctttacattacccctattcataaactagaaatttcctaggttagacttttgagttttttttaagagaatggtatccaaccggatgtatgcagcctttttaaattgaaaacatagtcctcaaataactcaatctgaaattcgatcacattgagatttgaatttaggatattgaagtgctactaaggttactgcaaccactaagctacatatcctttcgcaggctttagaggtatctagctgattttgtttctcattatgcatttgtgcggttatttaaaaaagagaatataagttagagtgaaacacactaatgggatgaacaatgaatggtcctttaatcactattgcaacaaaaagtttaattagttgatattgctactttgcctaatgcatatcattgtgccgacttgccccatgagacctaagtatgctctaccatgtcaaactcgaccatcccatatggccattatttggaagtggcaacaagggttgaattgcatagaagcattcttcgaatgtgtaaacttatgttgaaaaaggctaaatattggtttcttattagcacccacaatttgactggtagatattaatgtatatatgtttgaaagaaatggattattggttgaatttagctcagttcctcttgagattttgggaagaaattaaagaaacgaaatctagctgtaactagcatgatagttttatttccatttagagtatttacctggacttctggcattggattgaatggacatcctaatggtcttacatctcgctagtgtaaacttaaaatattcaaagggaaataaccaagaaagaaattaaagccgcctcttttagttccacttgatcttccttactaattttttagtattttttagaaagctcatgtagaagatcatattttatactacccatgaacttgacaatttctttggttagactttaagaggtaaaaggcagaatcatttggaagaaaacaaatgtgcatagaaacatgagattgagctaatcagtactatcatttatacttattttatattgtatttggatgacactatcttatttttggctgtgttctttgatgtgagttgacaactaatctatgttcacagaaaacagagtgacatattatcacatgattaattaagtataaactaaaaacttaacaaatggattaatacgatttttaaaacaacctttatatagaattttttaaatattgtttaacatttttaagtgtgcgtgtggaaaacgagagattgaaggttgagaaccatcacaaacggactttaacattagtcggtcttagaatatttatagtaaaatcgtaacggatttacttagcaaattgcaaaggatagacaaatgtcaaacaacttgcaattttttacacaacaatttaaaacacatcgattgatagctacctgacgagactaccctatcaccagccagtccagcccctttggctgctaacccggtcaaaaaaacgatcaaaatcatcaagtacaggggacgatcgttcagccgttctcaccaaccaaacaatgaaaagaaaaaaaaaagccacaaatgtcaacgtgtcactaggaaaagtcaaaataattccctcacttttacaacccaatcttgtcgcttataattatgcatatcagccaaaatttaaacttttaactttaaatttggagttaattctaagaatttttaccgaaatttatttttcagtctttatttttagatcgctaaaaatacgcatataaaatttatattcacaaacaattttcagtttgtgaatatatgtcctatggcttattcaacgacagggataatcctcccacgattttatttcattttcaaaaaccgcgccggcttaccgggcggcgactcgacccgccaacccgcctccacgcctacggagactgccacgcgggccccacccccgraaaccgccgcgaaaaagcttctcccccgggcccaccaccamccccccgggctaccgccgctgccgctgccgttgctacgcgtcccccgacaacgtgcactccctcttctcctctcctctccaattcgtctcctcctcctcaccacgcttgcttcgccatcccgcctccgcatcacccgccgccgccgccgcctcctgctcgtggtcgcggctgcgttgccggtgctgcaggaggtgcttcgggggggagatctcggtggggtttgctgcttgctgcttgaggtggtggcagttgaggaggaggaggaggttgctgtggttggcgaggtggggtggggcttggagtaagcggagggggaggaggaggggggtggggaggtggtggtcgtcgggcaggtggggaggatgtacgtgcccccgtcccgcggcggcgggggaggcgcggctggcggcggcgagcagcctagggtttaccaagtttggcggggaagcaacgtaagcgctctctagctctctgtctctttctgtctagcttcatggagcaattcgattttgtttgcctgtgaacggtggatctggatctgggcgcgcgcgcgcgagattagctgcagcttttagggaggatttttagccgttttattatgtgactgggcgcaggcgtgggaggaaatgagatgttttcggtttcacgtgttcgcgatttgtgtgatgcttatgttcgaaatgcgagtttaggggcttggtgtgacagaaatttgagccgtatttgatgcttactgtagactgttcgtgttctagttgtttatggttgggaaatatagctctggatgggtggaaatcagttcatattcgaatcatgaaatgttgatacagctaggggaaagtgtgtgctttctattgttacgagaatacacagcagaaaatgttttatatttatgttcagtgcttcagtttatttatcaggttgggtggggactggggaatgctagttcattagtttgttggggaagctacttcaattttcagaatatgaacttttaatgactcttacatgattatgaggatcatggaatggggactgcagcttttggtagtacaatatgttgggaatgtttgatacagaaagtaaaatgttttatatctgttgtgcagtgattagttttggcgagaaacacattatatattggaccgtaaaatgctttggttggaaatgtgttatgctctatatttctcgtagaactgaaacataccgagacaatggtaattttggtctaattgtctaaatgatccttttgattcctttgatggggtacttggatgcatttttaagtagaagaatttattcaatgatagcttctttgatcctttttattcctttgatgggatacttggaggcatttttttaagtagaagaatttattccaggatagtgtcatgctttagctcatctacagagtggtctatgcacagcgacctttgtacatgattcaatcacattctggcaggtgtaccgtcaataaattagtgcacgcttcgtctgttgaacaagaggtgaatgaggcatttgtgtatggagattacctcatattaccatctcgttcctggcatctccgtttcactagattctccaattgggacagcgtgcaactagaacaaacaatccattcaaacatctgtcatctgcatagtagtgtgcttaaggttgtgattagccaacgatgtgggatgatgaataatcttgtggccttataaagaagcaaggattaggaaatctttctgggagtttggatgtactttatttttttggcaagagtgaggctgttttcttattaaaaaatttcttagcttgtggatataattgtccatccacctaattttaacaagctagagaagttcttgatatggtacacattccgtgcttgggagaaacagctaggaatgtttcatattacaaagccgctgagttacatttttagatatcatttcctgtttctgattatttggttgttttcatgagattttagttttcttttgcccttctcactattagtgttagcagcttttaaccttgctatattgagacatcactatttaatgccataaagtgccacttttttggctaatcgactctgttttaaaaaatagcatgctgaccgttttttttataaattcacttatatatttgcaattatttcttctagtttcacgcattggattcattgataacaattatggatctttttttcaggagtttttcttgcaaggccggttcatttttggaccagatgtgagatctttgtttctcactatattcctcattcttgcaccagtattagtcttctgtatatttgtggctagacatctgatcaatgacttccctgatcactggggagtttcagttatggtcgtagtggtcgtcttcacaatatatgtaagtattgctaatttgctgcttctcatttttttttcctgttccctctaaattgattgaaggctgtcttagttctgctactctgaatttggttcatatgacagttcaaccatgttctctttatctcctagcgcttgcatgatcagtaaaatttctggccatgaataaaactattatgccaagggtttttattttagttagatgattatcaaaatcggataaatctgtcaaaagtgatgcacattcatgtgtaaagagtaacatagtataatgtgtatgggaaacacataaaaatgtgattggctactcaaacattgttatccatatgaaagggagttatgtgccgagtgaataaattactttgacagtgtaatttattatgtttggttgtttgctgcatttatttcccgagtgaatatgcactgctgcagtgtgtgcaattaactgaagcttcatttaattttccaggatttgacattgctgcttcttacctctggtagagatcctggtatagtaccacgtaatactcacccacctgagcctgaatcgattgatggaggcagtgatatgggaaatggacagactccacaacaactacgtttaccacgcacgaaggatgttttcgttaatggagtaattgtgaaggtcaaatactgtgatacctgcatgctgtaccggccacctcgatgctctcactgttctatatgtaataactgtgtggagcgttttgatcatcactgcccttgggttgggcaatgcattggaagggtaagtatcttgatgtgttggaaggtttaagatatccttattgcaattagcttgaagatttgatatcatgtgcggtgttgtggtctgtatacctcttgttggattttctatattagatattagtagattgttagttactactttaaagttttaacaagtcagcgctaattatcaacttatctgctgcagcgaaattaccgattcttctacatgtttgtattctcaaccacattgctgtgcctctatgtctttggcttctgttgggtgtacattgttaaaataagagatgctgaaaattcaacgatatggaaagcaatgttaaagacaccggcatcaattgtcctgatcatctactgctttatttgcgtgtggttcgttggtggtctgtctgtctttcatttctacctgatgagcaccaatcaggttggtatcctttcggtttttttttaagtttttacaaataaatctttcaagcatagcttaatgacttgttaaccgtccttttctttacttgtgtgtatcagacaacctatgagaactttaggtatcggtacgatcggcgggctaacccatataacagaggtatggtgaacaactttctggagatcttctgcactgcaattcctccttccaagaacaattttcgagctagggtcccagtggatcaaggtttacaacaaacacgcacgcctgctaggggtttcatgagcccgaacatgggtaaaccagttggagatcttgaattgggtaggaaacccgtatcatgggatgagcctcggtcagcagcagatatcagagatttggaagttggccttgggggtcttttggatgagaaagagggtagaatagcccatgcatccccagatctttctcttccgggtgagcttgtggaaggtagggctggtatgcattcgagacgatcaagttggggtcacagaagcggaacctcagagtcgatggacagcatcgctgtgcaaatgggaaccgaagctaactggggttcaatcagcagcggccatggtaccaccagttcaactcactagcacacatcactgcatttctgacgctgcatctgcatctattggatccatctcatgaatgaagaaccatgtgtgtactctcttctcctgtgctgcttttcaccttaggatatatacacagtgctttcttcctcccgtcctctgttgttgttccatcctggaatgggcatctattgatgcacatcctgttctagtgtctttaagcaaaaataacagaagatctttaactcaatgcgtggcttggattatctatctgtatatatcgagtctgtaagcaaggttgtcgtgtttggtttggtttggttttcgacgttctgtaactgtaccatgctgctcgactcttactcaagaaatactactacccaaatcatcctctttttctaatgcaattctttttcttcaagtctctaattggattgttttttttttctttttgggacatggtataccatctgcttcgcattcttctgcatgctgagctgctccttatttgattcttgtgttatctgctcaaccttttgtattcctttgcatactgagctgctcattggtactatgaattcggtgtaaaaattaacttcaaattcaatttgctcgaaaactttcattagcatatactccatgtaatttatccagaaaaacaaaagcccagttgcaattgcaacgggggtgttctgctgggttattttaatacagatgccactgaagcgtgtgcagcatctggctcgcgccgaccaatcactcaacctgcaacagttgcaacagtgggcttgtgtgtttggcatgctttccaacgcaaaaagggcacatgctgagctgcactctcctgctctcgcagcaatgcaatgcagaagcagcgtcgcttttggtgctcccatgaaaattctgtggcatcgccagtgccaagcattcaagtatattttgtaccaccattttcttgctcataccagagaaaaatcatcataagaaactttgtattttgagtgttcttctgtgtgtcatgatcatatgttcagtgaggcatgttcttacatgtttcacagagcttcagttccgctaaaaaagagagcagagtgggctaaagtgatcttaaaaaattaaactagaagggtgaagcgagtctcgggccactccacagctacactttagactccgctcctaaagttaggtttataagttagagtcctataaaacaaactcgggtttatgacgattattcaaggacaaaaacaattaattatatattagaaagtcgaaaagttgttttataaaagttttctaagaaatgttgaagtttttttttggcaaaaaaaatgtaatatttaggaggctggaaagcgtgcccacgataatccataagccattgtgttaggtcaagttggatcgttgtgacacatcagtcaccaaatcaaaaccgttccaaccacagttaagtacagaaaatctgaatggattcatgtgagagtgaataaataatcatcactaagaatcaagcagaatcaagcaggaaaatgcatgtttgattcccctgccaggagttcctgatgcaagcagatgaagccagtaagtacgtagtagtagtggcctccagctcgagcagcagtgcagcactagaactgatccagaaacatcaaattttccaacaaatcaaagttcagaaactggcatgtcatacatggaaaattcatactcctaagtgcctgcacctgaagatcctgtggatacaagcaatggtgtatatttggcacacaatccaaataattaactagagcagattccattgagtggcaaaaggagatgatatgatcaggttagtggcttgtaggcaagtggagatcaatgaggaggtgaggaggagatgaatcgtatctttggtctcctcttatcttcttctttttgaatttaatcttcctttccaataattgaaatgttcataattcatcagaacattataaatgattaagagttaactatctagttcttcaattagctcaagggaagcttctgtcttctcattgatacacatggtaccggcagggtttcccaaaccaccggggccggggttaccacgccccggcggtaggtaaccgtgaaaaaccatgcaaaatttatcaaaaatttaaattattttttaaatttatttgaatttaaggaggttaccgtggtatttatattaccgtaccccgcggtaagtccggtaaccgcgcagttaccgacggtaagggaaaccctgggtaggtataggtaggtaaccatgtaccgaatagctggataagactgtgacaaactctgcattttgccctcctttttcttgtgctgatctgagaaaagaacacatttatgcatctgcttaactagacccaagaaacgtgcacgaatacacatcagctcagtactctccgcagaaaagattttctcaggcttgtcttcagccacagcaggaactccacttgatcagtaataatgcatgcatgcatgccaagcacttactagcaacactacttcttcttgttcatcttcttcgtcgccatctcgataaaacttgccgttcttggagaaagtaaaggcacagttgggcagctgcattattgaatggttcagctattcaccagcatgctgaaaattattcagctgttcagtagctagtagaagcagagaaggtgccagtgaaacaagcactgaaacatttccgtttcatcgcctcctcattgccgcgatgcagaaaaggcctcgtcgctgcatgcacataatgtattaccaccaagctttgatccgacaagtggcaggcaaatgtgatttgcagctgtaaagcaagtaaaaaaaaggtataattgtccatggtttgatggtgaaatgtaacttactgatcaaccagatgcaaagctagtttcagctggtaattaactttggccatctctgatagatgcaactagcttaattgtgttgtgtttctgtgactcttgtgtgtggtgcatcatgtatccacatacttacatttactctttgtgttcatgagaattggcatgcagctagctagcagcattgctgaacctgaatgctgatcagttcagaaaaaatcagatatgagcgccgatcaatggatggaaagagaaaaggcctaaccttgactgaaccggccacattgctatagtgctgtactgttgtctgcatgcatgcatctctcttgtcagtgctggtcatggatgtgtattaacagtagtagtacattatgtaatgcgtctttgcaattaaaatgcacagtatagtagtaacaaaaacatgcccttttcttcccatagttttggggtccatgcaggtaattcatgtgcagattctgatactgatgatctgacagactgacaacacatgaaacctcagatgcaactggagaagacataatttgattacactctacaatatctaaatatgtctctcctatgtactaactttttgaatacattcctgaatttagttaatggaaggattattatctgacaaatgttcaattattcagtaagacttcaggttatagcaaacagtaggagtataatatctctggaccacttaggcacttaggcaccatgtagatacgtacatatgtaacatatgagaagaagagaagctctactactatatatacaaggcttctacccccaatgccaagcacacaaacattgggtgcagtagtgaatcctcttcagaagttcagaaaactatagcttgcttttagcatatataaattaggtgtttttatcttcttttgagaaggagatcaagaacaggcagtaggaggcctcttcctcttctccatggatcacctttgggcctctgtctttgggattcttggtaagcatctcatgcatgctagttcaccatctatacatgcatccatatggtagcatatggcatggcatggtctcccaaatcatgattttgtttaattatatgtatgacctcaagatatattattcttactgacatgcatgaaaaatgcacttttcttctccacaggaaacatcgtctcattcctggttttcctcgcaccgatgtgagttttgctcatttacgccctgattttttcttttccaaatcattcattcacctaaacttaattacgcgttctgacaagtgcacaattaaattttattttttactaaaaaacttaactacgcgcacgtcctgactcctgacacgcgtgtagttaagctttgtcttgttcttaaaaaaaacaaaagaagaaaaaaatctcaataactacgcgttgtggggattgtgccagagttttgaatttcaaaacatgtctttttgccagtggggactgaaagaactgaaatcaccgaaattttggtaatttcggattttttttgaattttcaacatattttgattaaatctgaataaatttacaaatatttgacaaaaaccgaaaatttcggggaractttgtgcttgccggtggggcccgaaattttcgaaccgaaatttcaaaccaatggatggtgcaggccgacgttcctgagggtgtacaggaagaagtcgacggaggggttcagctcggtgccgtacgtggtggcgctcttcagctgcacgctgtggatactgtacgccatggtgaagaccaactccagccccctcctcaccatcaacgccttcggctgcgtcgtcgaggccgcctacatcgccgtctacctcgtctacgcccccaggccggccaggctcagggcgctcacctccttcctcctcctcaacgtcgccgccttctccctcgtcgtcgtcgtcaccgtcgccgccgtcgcccagccccaccgcgtcagggtgctcggctccatctgcctcgccttctccatggccgtcttcgtcgcccccatgagcgtcatcgtaagaagctctcacctcatcgatcagctcttttcttttaaagatatataatgaaagtttttattgaactcagccaattacatcatatgatattataactgtagtaagaacattccccaacttgaactcaactcatcagttttttttaatataatgaaagcttttattgaactcagccaatattacgtcagatgatacaaccgtgctaagaacactttcaacatgaactcatttcatcagtttttttttaagatgatggaagctttattgaactcagccgattacatcagatgatacgatcattagcttgaactcagctcattagctttatcttttttaagataatggaagttttattggactgagccgattacatcagatgatacgatcgtactactgagaacactttcaacatgaactcagatcatcagctagtgatgatcttgcatcgtacttgttgagacatgtttgctgatcaatcgatcgatggatggatggttttgcagatggtggtgatcaagacgaaaagcgcggagttcatgccgttctcgctctccttcttcctcacgctcagcgccgtcgcctggttcttctacggcctcttcaccaacgacctctacgtcacggtaattaaacatctcgatcgatatcacatcaaatcttgatcaattctctcgaccaattcatgaatttcaatcaaagtttgaattgtttaatttgcgtgtagcttccgaacgtgggaggcttcttcttcggctgcgtccagatggcgctctacttcaaataccggaagcccaatacggctgccggcggcgtgatgatcctgccgacgacggcggctgcggcggcggtcgacggcgccgtggctgagcctgcggcggcggcgcagcagctggcggaggagctggaaatggagctcgcggccgcaggcgcgcacgcggtggccgtgctgccggcgaacgcgctgcccgtgctggccgagctgcacaagatggagcaggagatcgggacgccgcgcaagggcgccaccaagaccgtctgacacgtggctcgcctccattggttgtcgagtgccatgtcatcatcgtgattattatatatatgggcaaaatgcatcatacccagtagtaaatttcttaatttcagctgtttgtttgcgttccatttgtgtgtttgaattgagtttgtattgtgcaattatcccaagaaaaargaaatgtgcatgtattggttatgattaattaaattaattcgtatcctatcaagcatagttgcaagtcgagactatcttttttcttcctagccattgggtctccaatccaaaggtgagacagcccatctgaacttcgcggtccagtcagcccaagctcattaggcccagtatctctctgcaacatttttgcatttttttttctttctttgataaactcctctagtgaatatgtgcataactgaaatggacgctggcctgacaagatcaaattaaaaccaactcttatgtttgagccatagctcacaagtcacaaaacaacaagtgattcaaacaaatcagaaacaataagtactccagtgatcttgcagggggaggcagtattctatccaagcagactgtttgctaataatcttatgaccatgaggccccagaaaaaaaaaatcacatgcactattttagacttcccaatttatttctacacataaaatttttaaaagggaaaaaaaargagaaagaaagacgagaccacacagcagcagctagtgcttgaccagcctcttctcccatgtctccactccagtccaagccgattcacatgcatttgttctgttgcatgtatgcttcctcttcctcctctcctctcctctcctctcctccccatttctcatcttctctctctttctctcttactccaatctgatctccattgctcaccttcctagtagcttagctgatctcaatggcgacaatggcgagctcaggagcagcagcagcagccatggccgtgttcttggcaatggcgctggtgttgagtggcactgaggccaggttcctgtccaacaacatcactgtggttggctctgtctactgtgatgcctgctccaacaacactttctccaagcacagcttcttcttgaagggtgagtagaaatggtagtatacctgttacacagtagctcagctgcattagagttagttttgatcaatgtgtcattctgcattgtggtcaatcaatggtttgttctgaaatatggtggataaacatggagtgtttttacagcaggttattctttgtttctgagatagatttacaagatgctgtaaatctcttgctcattgcacagtacaaccacatgtaggatgtcttagaagtattaggttttttttttctgttctaggaagatgtcactgaaaagtgaaaactaataggcaagcgtgacaagacttctttttgagtacattgattccctatgaatctaaaggagacagagaaaagttgacatatgcacaattgcacataaatgtgtctgtggcttgttctggatttataattggtctggtcaattttcttggtccaattgtaattgttgtttagttttagttaatgctaccatgaaagacaagatgcctcacacaatataactcaagtttcttaggcccacttaaagcttggcatacactaactgaagttgaaatacaactgacaattactacattgtgccttcaattgcataaatgcagtatcatccagcttctactacccatctgggctctggcattgcaaacagaagttttaactggctctgagatgtgcttgttacacagtttcaattcagagttttgatcttttttttaaatggaaaaaaaatgtttctgtcggttattttgagcgggatatacctctaaatctcataatgctatgcaaattacaatgctgcctcaagctagaaatttccatgtttttggctttgttctaaaaataacgatttcattatcctaatagaacatagtgtctatgagttgccaaagtatgacattgcactatattaccaatgcctcattctacattgccactaaaactaaagctaagatcattcacaagagcagctggtttcatagatttcatcattgcattcaatctgaaatctgaacaagtaaaaatcagtaacttaccagatatgaaattgtcttcatctttggcaagaactgagatgctgaagccacaccactaatggccaccatggtgatggatgctgtgcaggggccagggtgctgatccagtgcagcttcaaggtgaactccaccatggccgaggagctgtccctggaggcggagcgcaccacggaccagaacggcgtgtacaagctcgacgtgccggccgccggcggcttcgactgccgggagggccacgacctccggtcggcgtgccgcgccacgctcgtccggagctcctccgccgcctgcaacgtcccgggcctccggggatccacgcagcacatcgccctccgctcccgcgccaccaacgcctgcttcctcaacctcaacgcgctcaacttccgccccgccaagcgcgacgccgcgctttgccacggcggcwatggcgccggcgccggcggcggcgctgcgttcggctcgtcgctcttcttctggccgttcttgccggttttttggccgccgtaccgggtcccgggcggcggcggcgggacggtgtcgttcccgtggccgttccccgtgcccggactggctggtgccaattcctggsggccgccgttcttgccattcacgctgtaccagccggcgccggcgggctccgggccgccgccgttctaccgcttcccgccttcccaagaagcatcaccatctcagccttagacctgaaaaagtacaaaaaaaaaacttgccaagattaatcctagattcttcatgtttagcagcaagagaggttgtgtgattgtgacattgttgtaggtgatgattctccctgcatcacacgtgtagctggagctagttcaggaattgccaccgtgttcatcgggctgatgaatatgtggaagtgataattataatgtagtgatggcaacttgttagtagtattcggtatattgtcttaaaatatttcctcgctgcagctaatttttcaatcatatttatatactgatgaatgatattgcagccgctaacactatcttggtactctttttttttacgaaccggcacttagaatgtgccaatttcattgaatagagggagaaatcctgataccgtttttctcacaatttaaacttcattcctaaaggaaataaactggacaactattttgaaaccgagagagtaattgacagatacaaaatagtaaaacttgtcagttgggtgaactcatgaaggtatatgcctgattcagtccagacatgaaccaaggaaaagtttcttcgtctgcgtgtaccagcagagtaactacccaatttgcatatggcacgaggaacaggtacacatatgtctctaaccgactgctgaaagtagagttcatcagaattgattgcttcgtcttgtctcgcggattttactggcatggaacatggtatgttttttgccaagcccaatggttttttgatttcttccagtggaactgacagtgcagtttgacaaggaaaaggggaagcagacacaagataggacacggtctgtttcatcatgtaaaaatgcatggttcagaagtaatttggctcctggaaacacttcgcagtgatgacatttcaaagttcagtttgattcaactattcagcaatcggttccaacatacacaaatctagctctgttaatctgaataaatattctcaaccaataacaaatggttaaacttatacggagtatattcttagacccaggagcagatgtgtcaaattgaggagagttgacaaggactaggcgaccaagactgaatccataacaaaacaaccgaccatttggagcgttgcattgggtgagaaaaagaacaaagaatcctgtttaggctaaacaacccttgtggctggggagttggacacctccattctaagtacaatcatgcacacaggtcaagaggtgtttatagctaaatctaatgcattattgacatgacgccactggcctctccaagtcggccatggcgtcactctttgcacacttgcaactcctgctccagttattaaccttccggtgctgccgtacctcatgtatactactaaatcactgcatccatggaccaagtacttaaatgctatatatgcaatcttcagttgtacttaaattctatatatatgcaatcttcaattgtacttcaattcaatatatctactctttaattgtaattaaattctatatatgaaatcattaattgtgcaagaaccatggatatctgcccccaatccaaaagatggcctttggaccaagaaccttgcttggtccatctatatatatcattcaccacctctcctttcaccttcccacatgttcttgcttaatcctttcactaaatgtgtaaacaagttgtcgatgtgccaccattagaaggagcatttgcaactttgtaatcactagctaactaaaaagaggaagctgttgtatacgtacgtgagcgtgggcatggccgagaagaagctggcaatggcggagagagggcggaggggcctgatcatgaagacgctggaccggtgccggccgccggcgtggaggaggccggcggaggggtgcctctcggtgtacgtcggcgcggcgcggcagcggttcgtcgtccggacggcgagcgtgaaccacccgctgttccggccgctgctggaggaggccgaggaggcgttcgggtacgcggcggcggggccgctgcagctgccgtgcgacgccgccgtgttcgccagggtgctggagcagatcgaggaggaggaggaggagacggcggccgccggcgacgtggcggcgaggaggtgcggcctcgccgccagagggcactccgcctaccggctgctcgtccccggcggccggcctgccctcgccggccggtcgtaggacggtgcagacatgcagtggagtgtttcttgtccatcgacttatcttgagcttgtggctctgatgataaatccacctaaatcaattaatgtatctgcaaatcatgaatattgcaacaagaggttagtgcttagtactagtagttgatcagatcttgggcttgagtttttcttttgttgagctcatattcacagaagatatgtgtatctcttaggtcgcagtaactgttgatcagttgatgcaaatgttatatattcaaattccctagctttggatatttatgatacagatttcccaagctttgaatgtttatgatacaaatctccctaacttggaatgttttatggtggaatgatgcttagaattataaataggttgcatatttgaatgcatctcacattgataagtttgtagtttttggcctcctgcagttcacttgtcaattgtcatgcatgtattcattatttttttataccaagcttctttaagtctactattcaatacatataatattaaaaagactcaatgcttcaaaaaccaaataataagtcaagatagcaattagcaagcaacacagcagaaacacggtgacgagtggaaaaatgggtcaacaatggacaaagaaccagtactaaccagcatgtacagaagattgaattcaaaaaaaggaaaaaaaatctagtgaatcactgcacatacctcctggtgctttgcttggcttgctagaaggttgaatcaacataagggactacaagtattcagcaattaacatctactgaggcagcacctatgctgttattttcagcagcacttgagggacattttgtcaaaaaatccaaatctgaaaatttcaatgtaatatgatatgcagttaatgattaacttttcttttttgctgggtcggccgaaaatcaaccaaccgaattgtattaagaagaaaagagagagttcaggttacaaaacgacattaaactgttgaaaagggcaaacagccaaccacgaaagcagcaaactgatgtccctaaaaggaaaaaagcctgggcacaactaatgtttcagtgttaacttggataacgaaaacaacagcatagaatttaaaatggctaggttccctgtacttttgacatctgtagagtcaaatgacaggggccacattgtttcgctagccctagtatcatccgaaaagctacaactcagtctaagactcggtaaataaaatcaagcagcaagaagaaaatgtcttgttacatgaaacgggctgacctttcaaagaacaagtgttggaggcgagaagtttttttcttatactcgattggaggcgaaaatggttgtgaaaattatacaatctggcataacaaaatctggcaaatcaaacaggctgctggttgtgtcatgtatgtgatcttaagcaaggtgtgggtaaaatattcactctttagatgagttttttggatctttacctcaaattcatagagtcctggttttcaatacttgcctcaccactagaatgtcttcagaatatggattctgaagccgtcaatttgtaaccaaattacaagaagaatgcagttacatggtcgcatacttttaaagcatgtgcagtaattcagattaggcataccaagactgcggttgcgtggtttctgctctacaaagatatcgcaattacagaagttctggtgaagaaacacaaagtacacacccttgaaactcctgaaactgagttcacttattcaatactcattgagaaacagtgactctmaacctccttcaggcggcctcctctgttgcctctgaccactgtgctctccttcttcattcctgcgttgactcgccaagggcgcagcgctttcgctttgaggccttttggcctaagtttgagggattcctccaagttgtgcaggacgcctggcaacctcctgctaaccttccccccctccccgcgcttgcctggtgtttctctaacacggctaagcgccttcagagctggagtgatcgtcacgtcggtagcgtccgcctccagctgcagatggcgaaggagctcatcttccgtctcgatgtcgcgcaggagaaccggtctctctcccccctggagacctggttgcaacgagacctaaagttgaagtcccttgggcttgcctctcttgagcgcaccatcgcccgtcagcgttcgcgtctgctttggctcaaggagggtgacgccaacaccaagtttttccaccttcacgccagagcccgaagacggaagaacttcatctcacgtcttagagacggggactagcttgccgtcacccatgatgagcttcaagagctcgcctcttctcactttggcgccatcatggggacgtgcgttgagcgcgagctcgctcttgatctccactccctcggcctctgtccggcgcagcttggggagctggacggccccttcaggaggtgtgggcggtggttaagtctttgccttctgacaaggcgcttggtcccgatgggttcacgggtcggttctacaagacttgctagccagtgatcaagtcagtggttttggcggctcttaactcccttttcctgggcttacggccagggtttctcctccctcaatgatgccctcatctctctccttcctaagaaagatgaggccgttgacgttcaagatttccgtccgattagcctcattcacagctttgggaagttgttctctaagattttggcctcccgtctttctcctctcctcgacgggcttgtggaggccaatcagagtgccttcgtcaaaggccgatctcttcatgacaactttcgctatgtccagctcgcggcaagggctctccatgccagacgcactccccgccttcttctcaaggtggacattgcgaaggcttttgacacggtcagctggccgttcttgcttgaggtgcttgcccatctagggttcagtcaatgctggcgtgattggatctccctcattattagcgcctcctcttcccgggtgctgatcaatggggtgccgggtccgcgcttccttcaccggaggggtcttcggcaaggagaccctctttctcctatgcttttcattctagtcatggaagtgctcaatgcgatgcttcgtaaagcctctgattcgggcgggttccttccgcttaatgatcgcgctttgcgacaccgcgcctccctctacgctgatgacttggtcctcttcctctccccggttcggcaggatctcgagttcatccagggcattctctcggtctttggtgcggcatccgggttgcgcaccaattttgccaaatgctcgattactccgatccgctcctcggatgaggacctggagctggttcactcttgcttcccctgctcgatttctgattttccttgcacctacctcggcattccgctgtccgttcgcaagttgccgaaggcggctcttcagccactggtggacagggtcgctcatcgcctaccaccttggaaggggcgtctcactactcttgctggtcgctccatgttggtccagtctgttctctcctccattccagtccatgtgtctatggcaatcggccttcctgcctgggttgttaaggccattgacaagaagcgacgcgccttcttgtggacaggtacagattcggttcatgggggatagtgccgggtgtcctggacgaatgtctgtcgtcctaaggccttcggtgggttaggaattcctaacctcaggttggcagggttcgccttgcgcgttcgctggctttggcttcagcgttccgggcatccctattgggatggcttgaaggccccggtcgagcagtctgtctccgacatgttcgaggcgtccaccttcttcgtgccggaggatggtgaatctatgctcttctggactgaccattggattgatggaggccactcagtggcctccttggctcctgacctcctcttcgctgtgccacagcgcctccgttcgcgcacggttgcttctggtctggcgaacaactcctgggtttcggacatccgcggggccctcactgtccctgtcatctcccagtttcttcttatctgggatgctgcgctccgaattcagctcttgccgggtgtcagagaccgtcttgtttggcgttggacgagcgaccagcgctactctgcgcgttcagcgtaccaggccttcttttttggccagcactcctttgcctgtgccgatcttctctggcacgcgaagggccctgctaaatgcaagttcttcctctggtttgcattttagcggcgctgctggatggccgacctcctcctaaagcgcagcttggatagtcattcggcctgccccttctgcggtcaagagcttgagacagcgaaccacatcctcctcgattgcgtgttcgctctgcaagtttggctccgtgtgctgtcgcctcttggttggactgcctctctgctctctggggtagctgtctccaagattggtggccttcttctagggtttgcttgccggggcatctccgggccagtttcgattctatggtcctcctagtctcttggcaactgtggaaagagcggaactccagagttttcgactctgcattgtcatcggtctcggaggtccttgagtccatcctctctgagggccacctttggtctttagctggtatcgctaattttggggttctcctgggaaggtagtggctctgccccctccaagctatttggagttgtgtgtagccgtcacagtagtcttttgtctcttctttattttagtcttttttctcccctttcttggtataagtcggtctgactgattgcgtcatgtaacaaacattctattcttctgatatattgacgtgcaattcttttgcgcgttcgagaaaaaagaaacagtgactcagtgaggcccataggaagatatttgatcaagctctaaattcaatagtccctgacaggttcccaggcatagaactttattcagaattttggacgattgcctcaacaaactttgaaaataggtaaaaataccaatatttactggaacctccattcccaaagtcccaatctacaacttgcaataaaaaccaggcgattacagtttctccccgaaaccaagtaatcctactgaccaccaggggagatgcaatgcatcgcaagacataactgtcggaatccccaagcaaaccgcacaaaaatcgcatcgcatgaatactagcgcgctatgatcctaccagtacacagagcacgagtatggaaggctagttgttgatgacttgagatctgcgaagagaacgaacagagcgagggagattcacctgggaatccccgcgcggtggaagactgcgaatcgctctccccggcggctcgccgtcgccgcctcgctccgccgccgtcgccattgggtttaccggaagggcaaacacgcaatatcaaagtacacgaggggtctacgtggaaaagtaccaaacaaatgggctggactcacaatcaattacggcccggcccagtagataccaccacctcacactccattcgcgaggcccacggcccaagtgacgcctcctaaaccctaatcctggcaacggacggcggatacagcccacctcctccccccacgccgcatccgacgctcacgaagcgtccacgtctccccgacgattgctttataaaaccaccacctcctcctcgcaccaccagtcgcccgccttcttcctcctcctcctccgccgcccgcctcgccgcctcccgagagctccaccctcgcctccggcgaaatggtaagctcccgtctccggtgccagttgccccccgcggttctcttcccgtggatcttgcgatccgccggcttagattttttttttcttcagttgcagcgtcgatttgtagctttgtattttgtgtgtgaatattgggatgctctaagtaagattttggatggcgaatcttgcaggcaccgaagcgaggcggcagggcgccggtgccggcgaagaagaagacggtaatgctcgccgtctctctgctcgaaatctacgttgtttcgttgttggggggcttgtgatttacttggatgttttgcttggtggttcttgcaggagaaggtgaccaacccgctgttcgagaagaggccgaagcagttcggcatcggcggcgcgctgccacccaagaaggatctgcacaggttcgtgaagtggcccaaggtggtgcgcatccagcgccagcgccgcatcctcaagcagcgcctcaaggttcccccggcgctcaaccagttcacccgcaccctcgacaagaacctcggtatatatctacatctcagttcgttcatcatgtcggattgcacctggaacgctaattggccgaactggttaggtgttacaaatgtcatttccttgttaggtttgtaattgtagtgactagctgatgaatgtgtcttcagtttatgatgaccttttgggtgttctagtcgaacatagttatctcaaattaatgctggctgtgtcggtattcttgttggcatggtagctctctgtccaaattttattctaggatagaatgttaaccctgtgtcaaaagtggtgcttttaagaatggaaaattgctaaagcagactattgaagttttgctgcagtatatggtggttgtcagtttttatcatgtttctgtttgtttatcactatgattagactcaacgctgtctcttcaacaccattgttatgtaggatcgtgttatcaatttcttagttgttaccatttcaaaaatgaagcaaggaaactcatctgttaaattgttaatttgtgttgaggaattaatggcataaaaaatatctgatgtaaatctttatttgcagcaaccaacctgtttaagatgcttctcaagtaccgccctgaggacaaggctgccaagaaggagaggcttttgaagagggcccaggctgaggctgaagggaaaaccgttgaggccaagaagccaattgttgtgaagtatggtcttaaccacgtgacttacctcattgagcaggtacaggagcttgttaatgtgttcatttctttgttagtcactcatcaaggagacttattcatgggaacatataatcaagcactttactgataatttgaatgcttctcgcgcagagcaaggcccagctggttgtcatcgctcatgatgttgatccaattgagctggttgtgtggcttccagccctgtgtaggaagatggaggtcccttactgcatcgttaagggcaaagctcgccttggatcggtatatttcctgactctccatactcaaattgaatgtacttattgaaagtatagatgctagtagaaagcggagctcaaccttcgcaaatgatcatatgcagattgttcacaagaagactgcatctgttctgtgcttgaccactgtcaagaacgaggacaagcttgagttcagcaagatcttggaggccatcaaggtaagaaaccacggcatcccttgttctctcattcatgatcatcatgttatccagtgctctgctctttagcctcattgctaactcggtgaaccataactttgtaggcgaacttcaacgacaagttcgacgaggtcaggaagaagtggggaggcggcgtcatgggctccaagtcgcaggcgaagaccaaggccagggaaaagcttctcgctaaggaggccgcccagcggatgacctaaattatattcgccccccgccgttgagctcgccctgtagtttcatttttcagtgtaatgattttgacgaggaactcagttagcaccatgcgacagtgctgtggttttctgaagtctagtttcatatattttctgttcaccgggaccatgttgggaaactatgcaagatatcagagctttacaatgtttggtttctacgcagtttatgctgtgtgttttgctactcgtttgtttgccttggctgaacctggaacatagggcttgatcactttgatgccattttcagccttatcaaattttggtaaagttacctaaaaaaaagtggatatatttagtttgctgcctaattttggtaatgttaaattttggtaaggttttttttcatcaaagtaaatagccccataaagttcatttcacagccttacagccatttaatttaagcaaaattatgaaagctaacatgttatttttttaattttttgtaatgtcgaaagttcttggtagttttgcattagttgaaagtcaaagtcatacgaaaaatgtcaattttgatggatatacataaatctaagatgcgagctcgcaaaaaattccgaaaccgtaagtttatattgggctagtagtaactctagattaggcctagcccaatttggacagttggcccaagattttacttggagctcaattatggaataagttcaccggagatccctcaacttaacagcgagattttttgagatctcttaaccacaaaaccagaaatcttcacctctaaactatacaaaaccgttcactcaaggtccctaggcagtatatatgagtggtttcgctgacgtggcatcctagttagccaaaaaaatttttttcttctcttttcttctccttctcttttctctcttctctatttctcttctttagtgagagaggccagcggcaggcgcgcttctccttctcttctcttttctctcttctctatttctcttcttcagtgagggaggccggtggcaggcggagcaacgcacgcagatgcgggtggcgcagcagagggcaagcgccagcggagcggcggcgggcgcaagcgcggcaggccgagcagtggagcgcgagcacgaccgcgggcagagaagcggagggcgagcgcggcggcgggtggagcggtggagggcgagcattggcagcggagcggaggtgggcgagcacggaggcgcatccagcccaccccaaccgaccaaagcacaccctttgccctcggccataagccccgccgccaagtcgccgtcgccgtcctcctcgtcgtcgtcgagcggcagcgatgacttcgcggtgctcctcgacgcggagctcaagctcacctccgccgctgactcgacctccgccggagacgacgacttcgaggaagacccctcccagccttccctccttcctcctcgagctccctcacgccggcgcccacgcagggatgggaagctaacagtgctggtcgtcgtggtcagctcgcttgccgcggcaacgctggtcccggcgctaaccggctgatgcgtctgcggatcgatgccctggctcatgagcttgcgcttgatgtgctgttccacctgcagaaccaatcaatcagcaccaagaacacaagaagagctaaccggagcagatgacaacacattgaaatttgttttgcttacttgttgccgagaagggcatggagcttgatggtgagctcgtagtcgtcgtcgatgaaagttgctgcacttgaggtcggggctaaggtagttcatccagtggaggcagcaactctttcggcagcggagcagcaccatcgccttggggarggagagagggtcgacagggaaarcgcgccgctcgtcgggcggcsgccgggcccgtggtcgagcacccagcacattcgaacatctccgccgccgagctcaccgttgcgccgaccgccatctctcttccgctcccgccgccgccatcgcatcgaccacctctctcttcctctccgccgccgccgtccccgctccgccgccgaccacctctctccccccggtcgccgcgcttgctcgagactcgagagaactcggagagaagagaagagaaaaagaaaaaaaaacaaagaaatgtgagacccacaccattgtctcacttacatgtgggccacacatattaattttaatttttttttgctggctaggatgccacgtcagtaaaaccacccgtatatactgcctagggaccttgagtgaacggttttgtatagtttaggggtggagatttctggttttgtggttaagggactttaaaaaatctcggtgtaaagttgagggacggccgatgaacttattccctcaattatttcccggcccattatacgcatcagcttgtcaccggcaggtgggcctgggtcccgtgtccccacgtgctcctcactcgcttctcgccacaaagtccaaaaagcccacgagatcaagccgttaatccaacgtaaagacaagttcccgtgctctctaatttcctcttcttctgatctcgcaaacaagaaatccccgggaaaagagaagcggcgggacaagatcgccagagattccacggacggacccaaggtgagcaagctcgatccatccccatcaatgcctgctcggttcgatctcgctacttctggattgcgccgggcgcgtgtcgctggtcgaatcagccggttttttgggtggaaagattacgacttactagtttggtttcttgtttaagatttgtgttcttgggaggaggcggagctactcaggcttgctgggagattgctcgttgtttgtttctgttactgcggttcgatgcgccgtttgtgattcgcgtgttcgttactggattttgcttccgtggatggcggacaaagggcatatcgcgccgattcttggagagttctctagatctggcgggaatgctcggctccttgatttgccactgctcttatgccccaattagatgggaggttttagctcttaccctaggaggatttgtgcatctgttgcctgctacagttaggtcatgggaagtgcgtacttcttcagtgatgtgggaattttacttgtgcgtctaatagtgagaatgagacaaataatttgtgtgtatgtgctaattcacgtgatttttagtaattctacctttgtattttgtctctgcattgtcgtagggagtgagtcagtgagctatttcttgaataccgcactatctacctgctgcttgaatttgaaccctttaataactactccctctatcccataatataaggcgcatacacatttcaagattcaacatttaaaacatttaaccaacacttagtataatattaaatgaattttatttgttaaaaaatatatcattagattgaaatttaaattactttcatatggttataattttgttgctacacttagtataatattaaatgaattttatttgttaaaaaatatatcattagattgagatttaaattactttcatatggttataattttgttgctacaaaccttctaggatatgagaaattataagttaactttgaccatgccttatattatgggatagagggagtatatagtatgtgaatttgggagactgcagttgtgtgttcttatttctcttaagctaataacctcactcgtctttttttgggtagaatgttacagctatttgatagtagttctgtaatcctatgttgatactgtctaaattctatggctttgtgtttcttgcagtaggacaatggaggggagtttgagattggggtttctgttggttctatgtatcttggccttcttgcgccctgctgcagctattcgcttcgtgatcgatagggaagagtgcttctctcataatgttgattatgaaggagatacagttcatgtatcctttgttgtgatcaaggcagagacgccatggcattataccgaggatggcgtggatcttgtggtatgatcttgtttttctttttcttacgtccaatcttcatccatgtaaatactccacaattgtagagtgtggtgagattcttgctttcattttttaataaggaacaatagctggctagatatttccgttcttgtagtctgataatgggcatggaggattgcatatggactccatgttttgtttgatgcttgcatgagcccttgagaactttccagttatgccgcatccaaaactgattcaactttgatatatggcaggttagagatcccaatggtaatcaaatccatgattcccgtgacaagatcagcgataagtttgaattcatagttcataggagaggcgttcaccgcttctgcttcaccaataaatccccataccatgaaactgtagattttgatgtacttgttagtcacttttcgtattatgaccagcatgccaaagatggtaagcatttttctggttttgttaaatttgtctagcaaggagcatgtggttgattcctttactctggaaatatgtagaacatttcagcgccttgtttgagcaaattgcaaagttggatgaagccctctacaacattcagtttgaacagcactggttggaggcccaaacagaccggcaagcaatatgtatgttcctcgtgtcttactctctcctttaaatactagtactttttcgaaattgtaatatgtgaagatctcttgttttcttttatcttgtaataaatagaacttatgagttgtagcaaatgctcaacttttctgtttctgtactaccgacaaactgtcctgccttaggagctccagccttttatgtcaacctttggaccagaccgccacacatgccacattaccaaacatcttgaaattgataaatatttgttacattgatgaacaacatgagaacacacaccatcttcttttctttttcttttttttccctttttttttgtaaatatcatgttctgtcaaaagcaaaatttacagtatctcataaacgtgttttgatgctaaaactgtaatactatatttgtctatctgatgcagtaaacgagaacatgagtaggagggcagttcacaaggcattctttgaatcagctgctctcattgcagccagtgttgtgcaggtctacctactgcatcgcctctttgagcgaaagctgggaacatcgagggtctaattctctgatagtaggtctccttagactcaccaacccaactgtatttcaatgctgcaaaatgtgtttacaatatctgttacatcctgctcagatatttagcatttttgttcagaattttgtaattcagttatttacagtactgtgctgcagtaacttgccgcctcatcagattcatttcagcgcattatatctatcgtcacatgtatattaggtcctaagtatttccacggtacgcactgctttaaaaccttttttgcgatcaaggtacaggagtgctagtattgagaaagaaaatgaagaaagaattccttttctgacaaagactcctaaacttcagctcatcagcattctactttagtttcacaatttcagaatccatatttcgatgataaccatttagtatgaagtattcaacgtttattgagcctgtattatttctgtatttagctgtctggaggtagaaaagctcagacgataccaaatccaaggagatgacaccaaattggtttcttgctaacatcacaccatctgattaggatacagttggaagccatgtgcagtctggttggtcctaaattcttttgctgactggattttttcgtgttatggataatgatttcacaaataatgattggcactactgcttgagccgataagcataacaactctggtattcgcatttcaatgtccagtttggttggtacatggagtcactgacaatcgagtttggaatctctgaccaaacataacagccgcccgtgacacgtatcaacatcaaggatgataaccaataatcttgaatttttcagtaaattctgcctgaagcactgtactttgtaaagttgcatttcagatatcagcacttgttctctgaatcagttgtaactttgtcagtaatttagtagcctgaagccctgtactttgtaaagttgcatttcagatacacgaaatcaggcatcagcatttgttctttgaatcagttctaaacctgtgaaaccttttcatgagtgtgtgagctccaccagaacactacctcactgttcatccacagttcatgctgctgttattaagctcaacaaaaaccttgatgcagtgatgattgcatagtttcaagggacaaggccatcagtctctggatgaatctgaggctgaaaaccgggtcaagttttgtcatggttcaagagaaacgaatgccattgtttgttcagtttaaatcttagcttttacagaacaaatcctaccaaaatgtacacaaattcataaatattacaaacttgttattagattttataaacttattctgatataaaattgatggttggaattataaatatttcgattgaatcatatcctaaacaatcatatcataaacatcaaatatttaggcctgtttagattctaatttttttcttcaaacttttaacttttctgtcacatcgaactttattacgcacacaaacttttaacttttccatcacatcgttctaatttcttcaaacttccaattttaacgtggaactaaacacagccttatatcggaggaagtagttagctaacaccaccttgcaatttaattaatactatacaattatcatcaacaaaaagctcttccacctttcamtcttccccactgcccaccactgtactgtacccccaccattcctgtctcttctcttcttcactccactccactccactccactcctctcccccatttggccactagcttaatccctcctcccccattggaaggaaggacaagctcgaggagctcctcctccatggagcgacgtggtagcctgtacggcgtcgcggcggcggcggcggtggtggtggtggtggcaatggcggcggcggccggcggcgaggcggcgaggctgtcgccggagcactaccggtcgacgtgccccggcgtggagtccgtcgtgcggtcggtggtggcgaggaaggtgaaggagaccttcgtcaccgtcccggccacgctccgcctcttcttccacgactgcttcgtcgaggtgagcagcggcggctggcactgacccaaccaaccctcgtgttcttgattcagatttcaaaccggaattggaggcgtcagagtttcagagtcgcacttgcaccctcagattttctggttctaggtttcttgatttctttcgtaattgatagcctcggtttgatttcggcgagtagttagctttgcatttggcatttgaaaatccttgcaaaattttcgcagcttttgcagcttcagagctgcttgtgatgcactgaatttttcagcattactctgcattaggcatttgcatacttgcaaagcttacaaacttttcagctgctttcctgatgcattcaggattcagcttagcagcatgagcagcatgagggtctctgaattttcagcattaatctacatttaattgcatcagagatcatgtcaaaatttggtttgttagtctcagggaaaggagagaaaagctacttcctccgtttcacaatataagtcattttaactttcctcatattcatattcatgttaatgaatctagataaatatatatatgtctagattcattaatatcaatataaatgtaggaaatgatagaatgacttgcattatgaaacggagggagtagtagtacgagataatgagagattaacagtagattaatggtacgaaatggcaactggattagctccaaatcacgcactcgtcgcttctgccatgtgactgcacgacccttttctgtcaactgggctgcgtaatcaaatgctcacgacagatgcttctctgaatccctgctggaataccaggcgccacgttgtcgtatccgatgtggcggacacggaattccgtgccgtccacgtcatcattcctcccatttcatgatgatttcatactccgggttatttagatcgatgtcatttcaaaccatatttttttataaagttgttaaatatatacttccatttatttctttatcaaactccagtaaatacataagaaatcatacaaaaatttgataatattgttaaaatttggtaaggtttattttggcttcagtttaaacagacctttaaatttttgataggtgtgcaaatgctttgatcactttgaaaattgaagttacgtacgttttcaattggcactgaaattattttgggggaattttaaccttttctgacaggggtgtgacgcgtcggtcatgatcgcgtcgcggggcaacgacgccgagaaggactcgccggacaacctgtcgctcgccggcgacggcttcgacacggtggtgcgcgccaaggcggcggtcgagaagaagtgccccggcgtggtctcctgcgccgacatcctcgccatcgccgccagggacgtcgtcgccatggtaaaccatcccatcaatcctcctcctcctgccatggcgaaagctttgctgcctctaacaaggtcgatcaatcaatcaatcaatggcgttgcagtcgtccggcccamgctggaccgtcgagcttggccggctaraacggcctcgttctccaagtccggcggcgttgccggcaactgccaggcccggaaatgcgcgtcaaggaccttgccgccatattcgccaagaacaactcaccgtgctcgacatggtggcgctctccggcgcgcacaccgtcggcttcgcgcactgcacgcgcttcgccggccggctgtacggccgcgtcggcggcggcgtggacccgtcctacgacccggcgtacgcgcggcagctgatggcggcgtgcccgcgcgacgtcgcgccgaccatcgccgtcaacatggaccccatcaccccggccgccttcgacaacgcctactacgccaacctcgccggcggcctcggcctgttcacctccgaccaggagctctacaccgacgccgcgtcgcggccggcggtgaccggcttcgccaagaaccagacgctcttcttcgaggcgttcaaggaggccatggtcaagcttggcagggtcggagtcaagtccgggaagcatggagagatcagaagagactgcacagctttcaactgaacatagttgcatagctgcactgcgacatttgtaagttgtagcaattggggatttgatcgtatattaaaaatgaaatcatttcaaggtaagaatttcatactttctgttttcggtccagaagtcatggctgagtgatgaaagcgacaaaatgcctcttaagttaactctacaattaaattaaaattcaaaatagccacagctgaaaacaaccgaaaataatttttgatcgtttaagccacggatgataagctactcttgttgtttcaaattatttgtcgttttaggtttgttctaaaccaaacatatctatatttgactacaaatttttagaaaaccgtataagttaacaatacatgaattatatattatgaaaatatttctcatggtgaatctaaaaatataaatattgagatgttaaactatacgagtttatagaaattaatgattaaatataaaaattcttgacttagaacaaaccaagcaatttaaaacggatggtaaaaacaatttatggataaaaccttttattaccattcttaatagtttgaaaagccaatacccaaagataaacttcgatgcaaatatctgaatcaacactaaaatattttagttttaaaatttaaatgttagctacggttaataagttaacaacagtctctctctctctctttctgtctgcgcaacggcatgcgcaaatctgacgttcgcagccgcttgcctgacgttgatacgtgtagcttcagaaaacaaaactggcagagctttcttgtggtggtagggcaatggccactgcttgcttcctggggttgctctcctcttgctttcaagacccatacttttgacctaatcacccaaacctttccttgctgttgtctgaacacgggccatcttgggacctactcaacgcttccagcatgcatggacagttgccagtagcaatcagatgctactaaccattttcaggttcagatatcagaagatatacagagctttcagatcttgctgtcttaacaaggatccaggtgttaggtcatgtccagaatgcctgaattcataccgaaatactatcccgttctaaaatataagagatcttgaaagtgcaaatacattgccaaaatccctttatattaccgaatagttcaattatggcatgaatcaagaaaaatcctggttcccaaaacagagcccttgagacagagtaaccatcctaaccaaaacagaggcaacagagcagctccataagattggagacaatcagtctgacagtgccagttgagcaaaaacaagatacaaaccttgaaggaaaagaactctccaattctgaaacaattataggatagatgtaataaataataaaaccaaaccgttctttttccatatgtacaaagttttctgttaaagcttgccatcctaattataatatataaaaccatctaagcttgttgcggcgttacatggtaaaaatgttgtccgggaaggaaaagataggatggcaacaacgtaatgccgcccaaactcttctgcttgtatacacctccatgagaacctacttctcattcaacttcacatgtaggacatgaatggaggcttggaaaatatataccctgccagaagatacaatccaaagctcttgttatacgataacgttggaaataggtatgaatgcaataaagacaacaactcttaaaagcatgatagtgatgataatagtgatataggcatgatactgtttacagtcagtaggaccaagaaaggaattgcactgatatcatatttgaacttatttgggttgtaatagctgatcttgatggtgaacttaatacatccgcattaatttaccccggaaaattgatgtagaatactgttcgtttgtgagacaagcacatcaaggttggcagggaaattgaggttcagcttcacctgtattacacccatataaagtattttctaatttcaacaattaactagctatatcaatttttctagatgcattgacagtgaaatcttgaaaggtgaaaggaatacactaggtcaagcttaactaggctattctattcttcctgggaatctaagaaagctcttcttctcgattgtcactagttgcatttagttcctctcaagctcctttgttcctaagaaactcagcttgtatcccgtcgaaacgaacaaagttataaacttaagctttctggtctcctacttagcaagcacgaaagcgctcaggcatccatttcattgttatatggccctttttgactctatatgtttacagctcctttccccctttcagttcatatggtcggtgctcaccgacgcaatttagtcccttacgccctttcaatatcgaatttcatcaacctgaagctatagccagcctctctacatcaaattagagatccaaaacatttgagaatcatctggattgcatcgacaaccaccaattctgaccctttccacttcttaccatcgcgtcaattttattttaactacgacaacaagctgctcacattatttggaatgatgtcctcccgaactaaatcaacgcaacaatcctaataaaaccacaatttaaatacagaagctacacatatctcaattttcagagaagcacccaaagtatgacagatgcttcacaattgggcataatttaagcaaaggcgctcaatttagcgcattttgaactctgataaagccaagaaacaccaccaatcatcatatttaccccccaaattacgcatgaatccacagtgaattccccaatcctgactaacccaaacatgtaaaaagaggagcctcttcccttttgtccccaaacatgtaggagccctactcctaaacggccaagatcacgtacatgtggaggccaccttgggcgaggaggagcacgaggcgggccagaggatggccctccagatcacggacaggttggtgacgaacccgacgaggaggaagacgcaggcgaggccgatgacccagggcatgaggaagaaccccagcatgaaggtcaccgacccgcacagcatcagcgccaccgatgcccccagcagcatcgacgctacccccgccgccgtcacctgccgcggccacgccgccgccccccgsccgccccctttcyycggccacgcccggagcaccgttcagcagcagcgcgcacagctcgtacatcgccctcgactggtcagcctccgccgcytccgccgccgccgtcgccgacgacctcataccacccccaagaattcttcaagaatcgaattcaagaaatcaagaaccgatcgcctcctcggcggtggcgcaagaatcttggaggaggcgaattgggtcggagaaattggttgtcgggtcgggtttgcttctcgatcgctctctctctcgcgttggtggaattgaaatggcgagatgggggaggagagacatggggggagatgttgaaatagaggggggaatgggaaattgggaatgggcggagacgtctacgctacgagaggataatggtaggctggatttgtttattcggcagttatttccggtgttggcgtggataactgtgcaactgattggttgcgttggcggtcaaatttgcactagcacttgttgaatcacaacgtttcaagtttatggaaaacacctcaaaatttgtactccatgctcgtaaaggaagtcgtttagaacagcaatacggtcttcaaaacacaactttaactttttgtttctataaaaatatttattcaaaaagtgatatatttatacttttataaaagtatttttcaagaaaaatctatacatataatttttacattttcaaattcaacaacttgagagttattcatgatttatatttctaaggtttgatttaaacattgtcctaaacgacttcctttatgagtacggagggagtacttctttctctgtcccaaaactacttcaaagtttattgtaatattttaagacaaatgaagtatactatcttcgattataaatattttatgtttggagtaagacacggtcggacttttgataaaacgttgacgatcattagtttctaaatcactattttttaaaaaaaatgatatgaaccgatttggcatgaaaaatattattatagtactatgggtttattggatctgcgagtttattataacatgaattgaatgtcgaggtttcagaaatttaaccacctctcttctcttatggtactccctttggtttaaaatttatggatgttttggacagaatatcacgtactactccctcctgtgccaaatgagttgacgttttgaggcttaaaaatattataatagtactatagatttattgaacatgtgaataccactctcctatatatagtgctccctccgattttaaaattattgatgttttgggacagaaatctcacatatcaaggaatgattaattgtgacgcttctctccggtgtcaaattagttaacgtttggacttgggaggcttgaaatatattataatagtactatagatttattgaacctgtgaataccactctcctatatatggtgtccccctccgattttaaaattattgatgttctgggacaaaaatctcacgtattaagaaatgattaattgtgacgctactccctccggtgtcaaattagttaaaggcttgaaatatatttcaatagtactatatatatttattggacatccaaatttattataatgaaattgaatctcaaggttcataaatctaaccacctctcttatatatggtactccctaattattgatgttttggataaaatctcacaatgccaaggaatgattaattgtgatcctactcactcggtgtcaaattagttgaagtttggaggcttgaaaaatattataatagtattgtggatttattggacctgcgaataccactctcctatatatggtgctcacctccagttttaaaattattgagatttttggacaaaaatctcacgtatcaagaaatgattaattgtgacgctactccctccggtgccaaattagttgatgtttggaggcttgaaatatattataatagtactatagatttattggacatgcgaatttattataatatgaaattgaatgtcaaggtttcataaatttaatcacctctcttatatatgtactccctccagtttcaaaactatttgatattttggacagaatctcatataccaaggaatgattaattgtaatgctacacctccgatgtcaatttagttgaagttggaggcttgaaaaaaacattctaatagtactatagatttattggacttgcgaatttattaaaatatgaaattgaatgtcagaaattcaaccacctctcttatggtactccctccggttttaaagttattgatgttttcgacagaatctcacgtaccaaggaatgatttgtgatatgctactctctccggtgtcaaattaattgatattttgaggcttgcaagatattacagcagtataatatagatttatttggacctgcaaaattattatgaatgaaattgaaattgaatgtcaaggcatcataaatttaaccacctctcttatgtatggtactacctcctgtttaaaattattgatttttttttgacataatctcactatcaaggatattatatttgttttttatgggacggaagaagtagatcgcggtttacaaggaaaatgctggcacaggtcttaattaattagtggtatctcctgttctctgcaccctttggtaattttgacgacgcagtgttatgcacaaaaacacgtggtgatatggtgcatgtgcattattatcaaatcgtctctattcttcatttcagagatggcttgctcattcgtgtttcggacagtacgcaactccctccaatttttttttwaaatctagcattataacggatgaagtaacaggaattataagctaatacacagcaaagatctgccgaagtgcattgtttttttttacaaaaaatacttatatattctaagagttaagtgtacgaacgggctataaacttgtgtgcagatatattatctagatctctaaattcttaaaatatattttcaaattatcaaacttgttttggatataatatatgatcaaatgagctttatcctactccatacggtgatgtagcatgtcatggtgacttttacagatcattagtattttttaaaaaaaaaacatgtttttctccttttaggtagagaggacaaaagataaaataaaaaaatattgaaaaaaattaaggtggagaggagaaagctaaggcgagaaaagataaaattaagaaaatactattaacgcatagctaggcatcactttgatatgtcacgtttagtatatcacgtcagctcatgaagtagagtgggttggaattcgtttgaatctatatcgacgtcgcaccgaagacaagttcagaaactcggaaatgtattctgaaggtttaagcatctagctagatgatatacttagggaccgtccttgtctaatataatctaattaatatatgatctaaacgtgcaacgcgagggttggagttgttaccatctcgatctatggtagtgttacagaatgcaagctggagcactgattgcgatcgaggtacgttgtttataatataatgtaccccgatctagcttgattctcttgtccttgttgcaacgtgttacacgcgaggaagtcccattcggtttgagacaacgatgatgagaggagacagtagcagcaggtacgcgaggaaatcgtgggcgacgacgtacgtacgggtgccgccgtgcattaatggctgcgacatattgtactacctccgtcaaaaaaaaaaaaaccgggtttccgtgtccaacgtttcaccgtckgtttaattttaaaaaattatgaaaaaaaaataawaagacaaatmaygcataawgtattaatcatgttttatcatctaacaacaataaaaatactaattataaaaaaaatttcatataagacggacaatcaaacattggacaccgaaacctaaggtttgtctttttttggacagagggagtagtagtagtatcgttctagatagtgctatatattgagcaagtttaatagtatagccaactattagctctagttcatctatagccaatttaatagcttatttatacaatagttatatactacactattaatatatggtcccacatctcatacacacacaatgtattagagtctgtgctgcagctggctacaaatctgaagctcgctttccttctttctctactgcacatgtgcttacaggtgacttgtagcttgctactgtactcgctcttaggttgtacaaatagtcaccacaggattagtttccgggcaatccggggcaacgcaaactgtgaaccgcgctggatgtgtacgtcgttgttgcttgcacatggtgataacatgggcatactttgaactcgggttgcacgtactgagagcatataagtgggtcgatccgtgaatctacttatagcctcaacgtaccgatttggtacaactcgtcaggaacgctacgttcacgccaaccccgcatttcgatcagcttgtagccttgtatcctcgacgtaccgatttggtacaactcgtcaggaacgctactttcatgccaaccctgcatttcgatcagcttgtagccttgtagcctcaacgtaccgatttggtacaactcatcaggaacactacgttcgcggcaaccctgcattttgatcagcttggtgacgaaagcgtgcgtttacgacggttgtgttcggtagtttgagttgggaactaattaattcctctcacatgtaaaagggaataactcattagtttatgattaattaagtattagataattgtttttaaacatagattaatataattttttaaaacatatttttaaaaaaaatacaaggttggcaatttgaaaagcgtgtgtgcataaacgagagaatagagttgagaacttagtgcctcttagatttgcatgaataatgtaggatttttggaaaattctaatcctatggaaaaaaattcttatgaaaggcatttaaataaaggattgtatcctatcatatcattttaaaattccttttgagtctttgtctcttattcaattcctataattttttatgtagttcaatcaaacggttattcttattttttttataatactctattttacaattacatttctactagaatcatattcttttattcctattttttttataattcttatgattcaaggggactttagggggtgtttgggaactagggactaaatttagtctctcgacttatatttttgtgagagggactaaagtttagtcccaatttagcccctccaaccaaacaccaccttagactcccagacacagccgaacttgccaatttgggaaggctgccgtctgtaggaattaactgccgtccaaaaccgcagatcgatgtcagtgtttggtgatggtctcgttgtctgaactctgaactctgaagccgcggccgccggtctcggtctccagacatgtgggttcccgccggagaaagtgcaaactgattctagtgcttgtcgcgaagcgtgccatggcgagcgagctcgtcggagacgacgaggcagccgtcgtcgtcgtcggccgccgcacgcacgcaatcccgttccggcccaactaatgattagccggctgccggcccaatcgacatgggccgtatggcccgagttactgtttgctccatcggcccggcccaagctagcaatcccatatgggcccgagttgcgtccgatctatatatcgtgcggcgaagatcaaagggggttaactgcaaaaatacgcacgggctggccctacgttttgatggcagttttagtgcagatgaagtggatgattcttggattcagatttgtttcatcgagccacctgaagcgatgcacaatccagcttggagatgaagtctatctgttggagttttgcctcgaaatcgcacggggagtaacatcctgattgcactctgttttcaccataaacattggggaaatttgaagcagtgtcttatattttcgaaagatcaatgagaatgcttacggttttaattttttcgcttatgcttatacttatcagtcatgattttttttggcaagaatattaaacaaacggaagatcccttattcttagggcataatatgtagtgtttggttcgaccagtccgatcaaccagccaaacaaaacttcagtttagtaactgcagtattacaatcgatttgtgggaccagcaaaaaagaatcggccaatcactagtctgtccttcatgcatgcatacacaacaaataattttttactcgttccattcgattctaattcgaagttcaatttgtcctctgataaatacgattcgacagctacaaatatacattgttcaatatacattaaaattgatttaatgttcacactgaagatgctcttattcaatattaaaacaattgaccaatgtggtcactatgtttacaaaattaatgaaaacaaacttcccaaatcccaacccttatagtaatgttttgacacatgatgactaagctgttggacgttcgtcaccatgaagtataagaacaacaagtttttagtagttttttttttttggataacccaagtttttagtagtgatggcccttggtgcggccgcaccccatgatggacgccggcagccgcggcagcacgtcgacgccctcctcgaacaccacgcccatgcccatgtacacgtgggcctccaggtggcagtggaacagccacacgcccgggttgctcgccctgaacctcaccgccgtccaccccatcgggtgcagcgccaccgtgttcttcatcacggcgccgcccctcgcgctcgccgcgttcagacccggcccgtccacctccggcacgaacttgccctcgccgtagccgagcacccagaagtcgtgcccgtggaggtgccacgggtgcgtctcgctccgcccgttcggcggcgggatcgccgtgttctgcagcaccacgtcgaccaccgagcccagggcgaggcggtacgcggcgtggcgcacggcgaggctcgccggcggggaggagaggttgaggctcccgtggtcgtagctgtccggcggcggccgctggtcgaactcgccgcggaggccgtgcttcatggcgacgaggtacggcgtcgccgggaagctgagggagacgccgttgatggcccacttggtgtggttgtcgatcttgctctgcgtgttgaggaggaggagaacgcggtcgggcctcgccggcggcggctcgacgtgccccggcagcgcggcgaacgacctgctctgcgccaccctgctcgccgtgtcgttccaccgtggcccggtcggcggcggcgtgcgcgggtgatccacggcggcggaggcgtacctgacgacggccctgcccggcgccgtcttggtggggtcgcggctgacgacgtgcgacgccgcccagtagctccgggacgggtcctggtcggcggtgacgagcacggagtaggtctcgccggagtagatgaagaggttcttgaccaccaccggcgtgacgtagtacccgtcggcctccaccaccgtcatcgtgtgcccctcgatctcgaagctcagcgacgccagcgacgtcaggctgccgatgcggaggcggtacgtcttccccggcgaggcggtgaacagcgtcggccacccgcactcgccgccaaacgcattgcacgccgcgccaccgccattgctggccgccggcggcgagcagttgaacacgcctctgccgttgatcagaagcgactggggctcgccgacgaacaccatggggacggaggcgaggccgacggcttgctcgtacacgctctggtgccaccagtccatgaggaggacggtgtgctcgccgtcgtaggcgaagggctcggcgacgccgtcgggcaccgacacgacgagcatgccgtccagccccgccacgcgctgcatgccgtagtgcgcgtggtacatgtacgttccaggctgaaaccatcacaaaaacacccagaaaatcaatcaaaatttgctcatccaaccatccaagcaaagaactaagcatcgatcgatcattgcacgtactccctccgttttagattataagacgtttgaccaagtttattaaaaaaatagtaataatattttaaaccaagataaatttattataaaatataattaattattaatttcataaaactaatttggtaatgtaaatattactatatttacttataaaattagttaaatttgaagcagttaaaacatcttgtaatctgaaactgagggagtagctgcttaccctgtcaacgacgaatctgtaggtgaaggtctcgccggggaggatggggcactgcgtgacgccggcggtgccgtcagcccacgggctgccaatctgcgacgacacattgccgttagaacaatacccacacggacgaacacatgatcgccggcgagccggcgacggcgagggggatggaacgaagatgaagaatgacctggcggatgccgtgccagtggatggcggtgttctcggtgtcgagcatgttgtggacggtgacgacgagggtgtcgccctgggcggcgcggatggtcggcccgggggactcgccgttgatggtcacggcgagcttcctgaagcagtccggcgacttgtactggtacgtgatgttccacgtgtggtggtgcgtcttcgcctccgcccggcgccgccgccgcggcggcgcacaggcacgccagcacggcgagccgccacgtcctcatcaccgcgcacaaagctgacgatcgagctcaaggattgggattttgcgacggatcagaggcttggaaatgatcggtttcgtgagcaatcggcgaggtgtgtgtgtgtgcgcgctttgtgctttgcactgctctgcctcgaggcatcgagtggatttatatagtttacgcgcgtcaaagtgggtgtgattttgcgcgcgcgttcataactgggggctggggctttactaccaggtcaagcatgaagcagctacagagctcaggttgaagcgttcgacggtgggccgggccgtggctcgtgtgygcgygtkggggcatggtacttcgtcagatcataagcgtgtgcgtggctgtgttcgctagtttcgtttcagttgggaacatctcccatgaaaacggagcggtacataagcgcgtgactaattaagtattggtaatttttttaaaaaaatggattaatttgtttttaaaaataactttcatatataatttttttaaaagaaaaacacactatttagcattttgaaaagcgtgcgcgcgaaaaacgggagagggggagttgggaacatgagggaaagaacacagtcaagtgggagtatctgatatttagcataagattttatcaagatcttgaaacattgactatcaatagtttgtcaattaatagtttgtcaataaacgttggcatacgtttaaaattaaacagaatattaagtactagtagttttataaactttaggctccacttgaatcactggaatgaaaaaaacggagaaataaaaaaaacacatgtttctaataagaatataagtgcaaaacaaaggactaccgaacgtagaaaaaacacagaaataaccatttgattagaccgcaggaaatacaagaatcgaatgagagagatataatcgaagaaagttttcaagaggttggagctcttgctaaatttcctccaaaatcattatttactccataggatttttgaaggataggatataattcaatcatttgtttcaaagaaattttcctacaagattaattttttaaaaaatttctctgttttatatctaaattaaatgggcccttattctattagacagatgaagttagagtgagtatatcgtgtcctaatgaacattaattagtagtaatcctatatatttctttatacttatatacgttgctcacttagtgcaattcataaatactatttctcttttttcttataaagccacattactttaatactagtttctaatacttatatgattaattaatgatcttaattgtgttcctctttttacaaaagatacatcgtctcaattatttgtagacttagcatggtcaacctatggatcatattgtctcttgtctcttataaacaacatcatctggatcaactattctaccgttcttaataatagatcaaagatgcatattccgtaacaacgcgtagtatctagcatttccatatactaattcgcggtgatgatttccatgacaaaatatcatgtttatttcgaggagtgtggtcaacgaagcgtagctctactagggtttcataaatgctacttcccctccgtcaaaatatattaactttacaatttatcttaaatagagcgtttacctactcacttatctcaatcaaatatagccatttctcatttaaatctacgtatagaagctcaaaagtgctttatattttttggacaggaagaaaagatagtactacttagggcacccacaatggttatctataaactctctacaagagatccatgtcagcatattttcctacttggaagagatgaaaaaagagagcaaagctatctactaatgtgaagatagtctatagagaaaaacgaggcaatatattagagagctatagatacccaagtagacatactattaaggtggtttactattaatctagtctattgctgagatgtacatgttttacagagagcaccttactttactattgcgggtgctcttatgttttatattataaatcgttttgacttttttcctagtcaaactttttttttacgtttgactagatttgtagaaaaatataatagtatttttaccacaaaacaaacatattatcaaaatatattcaaatgctagatttaatgaaactaatttgacgtttaaaatgttacttttcttctataaaacctagtcaaatttaacaatgtttgacttagaaaaagtcgaagcgaattataatatgaaatgaagggactagtactttgtatgttttaaattacttgtcgttctaccatttaaaagttatgccaaaacacttgtcattctcatattccaaatcactttttaaatgcttttttcttcttacctttctctaacacaaccatgctagtagtagtctcttataaggaattctaattcttactttgaaaacatgattaatatgtaattaagaagaattgcaatgtaatttgctatgacttcgtacgattttctggaacgacaagtccaaattaaaacataaaacggaggaagtataaatatatatacacgcttcgttatgcaaactagtactaataagcaaactaccattaatgcatttggcgtttgaattaatactacgagttgtacccgttgtctatcagtggagattgtctacagtagcagccactgacatgtaggatcgggttcacctatcagccactgctactgcaaatgtagtactgcgaagatccatgtccgttgtctatgcgtgtcgtgcctgctctgctcttaaattggtaaaaagtattggttagggctgaatgcaaaatgcatgtactcctggtcctggacgcatgcttaacgaagacgagatccagtcgaagccctctttaaaaccaatgtaccatatatgggcvtaaaaagcaaatcactcaagttgaaatgcctgcatctacattttcgctcgtacgttcgcaatcacagtttcgggtcaactaactatctgcgactcggacaagtacgactgcttgacagcccaactacctgggctacttgcatgtttcttttccttaattttcatgcagaccagcatgctcaatttatgtacaacgacagctatttttttagacaatgatgtacaacaactaatcagttaacctaatactcctatatataaagaacctagaatgcacatgagcatggtaattaaacctcgacattttattatatttgacacactggatatatagtcaataaactttaccgcaaattatgaaatgtacaggcactgcactgtaccatacgtagtttttgtgcagcatataaccataggctgtcacgtacggccttttataccacatactagtccttgaacgcttaataataattaaaagtgcgtgcatcacatcagaaaagtttcaacacgctagcacacaaacacggaattactagtctcactcttgtaggagaagatcaatctaatggtgcgacttgatctgtgtcgtcacatccgtttttattggttgtcgcatcggccttcaggagttcagggtagccatgtcggcatgaaggcagtcacgcatgagttgttcatctgctctggagtaaacctacgaagagaatcaaattgtgttaagggtgtgtttagttcacgccaaaattagaagtttggttgaaattggaacgatgtgacagaaaagttgaaagtttatatgtgtagaaaagttttaatgtgatagaaaagttgaaagtttgaagaaaaattttggaactaaactcggcccaagttcatgtgtagagagcattccatacctttttttagcacagaataaaatagatacgcacgattgagtggacctccttagtaatctagtaaggctagaaaaacaccattcatatctcttaagcatgtgttaaaaaagcttactcacggatgtatgcgtgagtgggtgtacgcgcgtgtgtagtggtatatatgtgtacgtgcaagcttttcccgtaataatgaaaaaattaaactggatacacaattggtttcaagaactaatgagatcagagaaacgatcatgaagctgaaatgagtaacatgcattttatacccgatctgcaaggtgggctcggcggcagcttccagggaatggaagaatccgttgccaccgtgcggtggcacctgctggacggcatgaggcgactgccgctcgtagccgagtagggtggcgccgtgctcccacacttgtccatgcaactggttgctctcctccagcttttcctcgcaaacgaatcaaacattagtagtgctcgttattcttttctcacttgtgtttttttttttcatttcacagcatcattttggttatttcacagagctacgtaagcaggcgttagccaggagatatatatatatccgaggaagagatgccaggaaaacggacctaaatgcctaaatcgcaaccgaaaacagtgtgacctcgtcttgatcaattgttaatatgcattgcttacgtgtgagagatccttatgttaattaatatgcgcagttgaagtaatatgctgtctacgaagcttcatgtacgtattcgttatgtagaaataaccaataccaaatgttcttttgtaatatatacaattcatcctacaaactaatatgcatcaacgtacacaaacttgtccagtttctgttatacgcccttacaaaccatattttatatgttcacatgtttgtaagtttatgtggaaggaatatataaagtgctaactaaacactgatgttaacatctacacattgaattcctgatcagattaaatttagtactacatggatgcggggctttgattttgaacaagcacacataaaagtgaagtgtataaattacttttaaaaccacatacttagttcatgcagaatcttaagatcaagtaaatgcatgaaacttaaacgggacaaggaattaaacttacttttcttctgaggcacttatttgcttcacacaacatttgttcctgaaaatgatttaggtatataaagttagttttggaaataataaattttcttgcctgaaatacatagttggtaagttttatgtcaagcttgtaccctcctctggagatcagtgagctgatcaagcatatgctgtgtctgcaacaagattagagttaaatttttttcaacatttctgaaacatatgtgagaaacagttaacaaattacccttgtggatctaatgtgcctcaaggatgaatcaagttgtttctcaagctgctctagctcttttatgccaagtgtcccaagatcttcaccaagaagattcctgtaattgtcaacagaaagatctactaagttaggctgtatttagttccacactaaaattgaaagtttgaagaaattggaacgatgtgaacaaaaaagttggaagtttgtgtgtgtaggaaaattcgatgtgacgaaaaagttaaaagtttgaaaaaaaagttggaatctaaacggggccttagttctgtatattttacactgtgattgatgcatgcatctaattctctaagcaacttcagtatatactactgcacgcatctaattctctaagctagttctccctgagattactgttttaccacttgtaaaccctatataatagagacggcggtaggaccttcattgggttcacatatattacttcactcttgttaacactagtcatatgtggttttttccatgcaatatagttttgtttttcacccaaatggccaaaaagtatctagtgtacacataattgttcttgccccaatacacaataatttatctactttgcatatatatgaatgaaaccaattaactgtgctccatttcgtctttgataaaattgaactcataagtggaagcctgatattacctttgggtcctctgtaaattttccacccgtgccttcagtttgaggtactcattgcggctgctttgcactaactgaaaaataaatttaacttcagtacaaagaaataggaaacaatttagagattctatgtgaaaacaaaataatataatttcacatgcaaaattaggcttatgaatgaacaatttattagaaaacagtgatattaattcatgaatccatctatcatatcatggtcaataaccagtgactaggagcttttctgttttatattcagatctacatactagacatttcagctagcacaaattagagttgtaaatcagtgttattacatgtggaaacacaacaacaatactcattctagttatagcactctttcatatgcaaccttttgcagtgctctcatttttcattaaattttgagtcttgtagcaacatcacatacattaagaagcacagcgaatatattaaattaagacttcatttttaattgtactattcaacacgtgtatatagttggtaattaatgataatactaaaagcagcatatctaggatcaatcaattaaactgcatgaatcgaattgttgaagtattatccagtgagacacagatcgattaatcagaacacaaagctagtctatgcatcaacttaaatccataaaagcttgtcataactcactaaaaattaaaatatattaatagaatctagtaacctcattttccttgttctgtattgcagtatctggcccaccataactgaatttttggtatctttccaaagttctggtcatgctgcaagtttcaaaaacacaaatggctatgtttatggaaaaacgaaataaaggaacatatatagttcgcccataactaaatactaacaatctagggcacattcttttccggggaccacatcgattaattagtagatgaaaaatcttgtttctcacaaaacatgaacattagctccatgacacggatgaaggtgcttgcataattggagacaatttctaagaaccataacgttttatcttaattcttgcatcggtagtttcaagttgatttataattttatatatgtccatgatatcaacctagaggccactttttgtaaagaaaatggagtacactctttaaagagagatatcaagttcagacgacacacaatgaaatggcataacttcacgcagactactactacagctataatgctcacccccccccctctaccgcgtcaatttagtgaccttttggctgtgtttagttcaacgcaaagtttagattttggttgaaattggagatgatatgactaaaatgttgtgtgtatatgacaggttgatgtaatggaaaaggactgaagtttggatccaaacacagcctttgtttaaacaagtcgtgaattcagatttctgaaaaggatctacagtacacgttgagtatcaatttgtcggcataaaatactccactgaactagctctagctagaactagaagagacatctgatgaagaccaatcttctgtactgacagctcagctacgagagctgaggagaccaatcgaatgacaatcgaaagctgtcactaactgtaccctgcagatactcaagtgagtcctaggaatattgtgtactcccttgcaggatttcttccgaggagcagaggagggatgtttcactcaccccatatccaaattgaattccctggtcaatgaaatcatgtactcttatttgtgaatatatttaatgttagaattttataggcgtattaattttaatttagtaacttaggtataatggaaaccatttaaacataactataaaaattggcaagcatgtactccctccataaaaaaagaaaaagaatgctaaagtccccatatacttacggctgattataagccataacggcttattagcaaccaaaatataatttgtgagtaaaattgtatatgtgtctttagcgaattaaaagttaatgctgaaaaacaatctacattgacaaaacattaaaaatcaacttctaaatcaagtttcgaaattcaaaatttgatattggcttataattcatagggtaaaagatgaggccctaacttctagctataaatctggacatagcctatatatgtccaggtttggcaaaaaagttggttttttctgcaacggagcatataataatgtaatcattatctaaaatatataatgatgtaatattcactatagaagatattattaaaatgatcagtgcaatacaatgagcaagaaaatttaaccttctaaagtttggaaaatgtatgattcaaatatgaaatgaagctcatgaatgcctgacttatctaccctaactaattgtttatctctaaacacaataccaaatgttttcttccccccgaaaaaaaatgttttctaattcaaaatcaattcaactagcttatatgcggcttgtgaattatgcctagccaatcagacgctctgtgtttctgaaagacaattatatatatagtagtatatgatttttcatatacttatctcaggagaaacagactttatatttattgatgttgcctttaatgatgcaaccataactcacttgaaaaacaatactccccsgcggccatcccttaaaaaaacaaagagacaaaatcttaagtgaaacccccaaatcttgtaaggtatgctgcctccaaaccgtggaattcatgcagtgaacgtttgtttagacacacatccggtacatggctaatgatatgcatgatcccttcacacaccccccccccccaaaaaaaaaaattttttt

SEQ ID NO: 505 - DNA, 15439 bp, Oryza sativa
  misc_feature (1)..(15439): CL004886.208 (OsMADS13)
  misc_feature (1)..(15439): k is g or t
  misc_feature (1)..(15439): m is a or c
  misc_feature (1)..(15439): r is a or g
  misc_feature (1)..(15439): s is c or t
  misc_feature (1)..(15439): w is a or t
  misc_feature (1)..(15439): y is c or t
taatggtaamagytcagtacgggtattcctttgcgccggtatatagtcctaagttaattccctggggagggtattcctccgtatttagccccggttgtatggtcatgacgggctatcataaggaactcaacagttaagggtggcttctcgaagtaccaggagggcatcggatagagggtattagctagtatatcagttaactagaatgtatatatgtgacggagcgtggggctcctcaccgggagaccgcgcaagcccccctttgccggttcggccgggggccctggttgagattctaagcttctagtctgtggaaagtttgcgagaatggaaaaagcacaagacacgggcgatgtatacaggttcgggccgctgagaagcgtaataccctactcctgtgttctagtggatctgtgtatgaagaagctacaaagagctggagagccagagagctcttattctaaaaaccctcttctcctttttttttctctcstgggatctcctctccagatcctccccccttccagcctcccctcttaagtgggcaaggtcctccttttatatctcaaggggataccacatgcaccacttctccctctctccttttttgggtgggggcccatcctatctatagtaaaacttggcttgccttcttttggaagctgaaacactgcctgtttttgagtgtggccacgcgtcctcgttcgtctgacctcggggatcaccctgtcatctcttcataaatgggcggagatttgyaacggctgctgcccgagtgacccttctgatgggacggcccatacctacctccactccgccggaagcaggtgcaacgtgggaacacggttgtcttccggcgacataaccagtgtcagaccagtcacagaccggwcacctttgtccaccacrtgtcagtttagcaatctgcatgttcgcccttcttcatacaacgtcttgcttataaaggttgggataaagcctggcatatatctgaccaggaccaacgtgccatctccaggagctagcacgctggctccggctagggacgagtgcctagagactctcatcctgacgggacggggcgaggcgtgtgtcagatcgcctgttgccacctaacccgcaatctgaccgatctgtgaccggtcacagaccggataaacgagcgtgccatactgcgctacatgtggcgtgacgcgctcgtccaaaccgcaataaatgcggttaggtgagccccgctatgctcacctaccccatatacgcggcgcaaaacccacaaggggtcggggcgcctcggccctcggggccgagacgggagcggtccgacccctcggggagacaaagagaagggcggccgtatcaccctcgggcccgaccccccccccgggggttwgccacgtgggtgatcgtgtckscyyctagtctctaagtcatgatactcccggtcccatgtcaccgacagtatgtatactatgtatattagaagtataagaatatattttctttatcttttctttccacatagcttagatgatatattatgagaatgagtagttaatgcttgtgtgtcactctacccttggattattttaacccctgcttagaatatgattatcataagtaaaataaattattactcaagttctctctgtatgatcttcccaggggataaaataaatacgatacacttggaatactctcgggtgaaatgctacaatggtatatccgtgcgcttgcagatgaactctgtaaccataatataccagaagtatttatgcgccattgctgggaattatatttttagtaatgtcgttaagaaataccaacatccactcgtgcaaaatgtaaaatcaaggagctaatttagattttgtgatgaaaatattggttgtttgttgatgatattttggagtttaatagacggttgattttgtgaatttggtgttttcggctgaccctagcggtcagaccgactgggtgccgccggtcagaccgcaggtgttgcggttgtcagaccgactgacccgatggtctgaccgtaggggtgaaaacagtcacggaaattcccaatcaaccgagcgctgcttccgtataaggggtaccgtttctgaccgtaccctttttggctatttttagattttgttttttctaattttttttcatcgtattaatgtcgacagtaagtagtttaaatgataaatatggtcaattatgtatgcaagaatcatttatgtatgcttagtcatgcttaattaccactagctcacataatgggataattacattatttacacttagcatcttgatgagctgtgagctcgagacatctggccatgttttttttgtcataattatccaactaaaatgtggcttaatggtgggctatgggtgcatggttttgctagtcgcacccatggcaattaaggatcggttcgcgggaaaccctcgaagaactaccgtgcttaccacaagctagcgtgggcaacggctaggcttgtagtgtaaatttccaggcaagggcgagcgtgatggagtttggatgggccctgtgacggcctatacggctgccggattcacctaggcacaagaaagggttgcccgctgcctgctgaggagtgggggcgaaatctgaggtgtggtacacttggttaaagggggttatgcgaagggtcttatcacagtctctttccggtgtatcctgctgacatgtcggcgcacggaaacatgtcgtggggctatgtcttgtaggtacaattgtacacctttgatcaaagtaaaattattcgaatagccgtgtccgcggttatgggcaatcaactagcttcaccgtgattagtcccactctattaattaacttgacataatgaactgatgtggttcaggtggtttggttggcatgttcaacgtggtgtagccttgttcagtggatatataatcttgtcttaattaaccaattgttttactgtttccagctacaaaatatttacaaaccgcctttataaaaccgtccttgactcccattgcacgtctacatcattggtgcgacttgttgagtacggtggttgtactcaaccttgctattattctcccttttcagaagtgtagtgcttctgagctgaagacgaagttagaggaccaaggcttatacctcagttgagtttttgatgtggggtggagctgaagccccgctaggatcgtatttttcggttgctgctgctttcttttcggtgtgaggactaagtgccttgtctgtaaataatttacgctttattttcgtttgtatatgtatattaatttgtcgttttgtgtaccctgacttgattcccggatagagatttaatacacaaaatagtctgaaaattttgggctaaatttctgggcgtgacagatactttagaaaatatctctatgctttctagcacattcatataggaattttttatgtctataagggagtataggcattttctaaaggcattaacctaccagaaccatatcaaaccaatgtaaaaaaataataaaaaaaacaatatcactttccttgcaactgccaatctttgaactcaaggcatcttgaatataccatttttaactagaatggtcttaccatctcaacctcatgttacactcttacatatgagcccaatgttacttttatctagttaatcagcttagattaaaatttctataagtgtctctatagagattgaaattttaaagtgccaaaagagtgtctctgcaagataaatttaataaatctctactacttaaaaaatctgtagtggtggtcttgattcctgacatagcagacgcatctaacaaacacgtctaatctcaaccatccgattttcatatccaatggcgtcaaatctcctcccatcgctcctctcctcatcacgcgccacgcccactcctttccccacgccgcgtccttcgccctcctccctgcgtcgcctcctcgtggtcttgaatccaacagatcagatcacaattcaatcttccgcacgcgccccacgcatcgtygatcgcacgcggcgcgcacacacacccctttcccccgattttctctccctctcaacgccgtctcccatctctgtttccttcgcgtccgcctcctccgccccgcaccaaatcttcgcctcctcttctcccgcctcgccgcgcatgcgctgagtgagcaggctggcagcytgatgaaggcacactwacgacccmaatctccggctcgtcgaccgscctccacgcacgccccgcccccgatctccgccgcctcttctcccgcctcgaccgccttcacgcgcgccgccggaagccaatctcctcggcgccaccccattctgtgagtagtccgcctcctccgtccggccccctgtctccgcagcctcttctcccgccttgcaggtgccctccaactcaagagggctgagggcgagcacggtggcgcatggcgactgagggtgagtgcagctgacgacgccacatgacgaacccaaccggctgcatgttatcttccccccaaaccctaaaatttccccatctctttctacaaatccatctacatgttttcagatcggggattttgtccttttaggcgtgttaaatttcaaacatgggaattagagatcggggattttgtctttgcctgccatgtttgtacaaattatgctaartggacagcatgagaacactaggacagctgcttgtgtcagagactgaatgacactgttgcataacactgttgctggatctcctctctcttgagacagggttatctttaaatcagtgcaagtacgtactgtgttctcaacaagaattgaaaacccaaatatggatttagttgggcatgatgtgtccattaaggtaagcgatcacccacataacccccacaaataatagcttcagaacaagtagattgttacatctgaagaaatatcatatcactcctgggcatatattccatatggacaatatgatcgaacttgtgaagcatcagacatgcagaattaatttttttccccttattttcttgattttgctgcaattataagtaagcattgttagtatgatcccatggcgtgtaatagcagttctgaactgatagatacctgcaccctcaagaaaatggtttctaccgtcagagtaacaggtcagggtcatgctaattaatactccttctcaaatgaatttttatctcaaacagtctcaattcaaaaaaaaatcagttcatcagtttgtcaaaaattgtcgctggatggatcggttttagcattaatattgaagcaaataaatgcataggtgaattagatttttttttctctataaggatattttgtgccacttgctttggttgtcggttagttcatccatgaactcggtagggaacttgtctaagcaaccaatggtcaattttctcatgaagcagtctttttttcttaccagttaaaatgtttccagctacaacaaatactcaggtttcatttcattgctcaatttcagatcatttgtcgaggttggaattgctgcgggatcaagcgaagcctcgtcaggccatgccctcgtctcattcctcagtttatagagtccattccaagcaggtacaatatacatcctcggaacaaataaatgtatttggttttataagaaaaattagtttgcagtgcatcagtgatcctatattcctgcttattggagtacatacatatatgattattggcgttcatctgtgatcagttccctaggtttagatccattgtgttatttagaattagaatggtcatttattcagggggctttgacctgttagtaacccgagtcaagtcatggcctaattaactgaatgaatgatttcagactcaagaaaattgaaaataatctacgcatcttatcttatgaaaatagtatgggaaagagcacaggaaaataatctatctgaactataccagtttgtagcgtgggaatatgttatactcagttttgagggtgtaccacggtaactaatgattcacagctgctttcctccagggtgaaccctcactttgctggttggctttcagccgtggattagcaactggttcatgttctgaaatttttatactaaccatcctcagtctgtagtatttgaaatcaatctttcagtttgttctgaaatttttatactaaccatcctcagtctgtagtatttgaaatcaatctttcagtttgttctgaaattttatgcagaatataaccaatgccagtattttggaatgagcgcagaattgatccgtcacttctgaagaaactccgttacttagcagaagcagaggccacaacctggcagcggctggtcacttcagcggtctccaattgcctttgaatacgccaatggtaatttcaaaaatctccaagtagtccactaattttattacttacattttttttcatctaaagcaaaattgaaaacatatgtttccttgtaattctaaatttgactgcacatattttgatttttgatgagtactgctcgatagattcaaaacggccatgagttttttttttgagttgaagtggcaagagcattgccgaatatattagacgaatagagttcaccctgtttataaggaaaaccgggcccaaaaaacatacaactgcccggtttgctaaagtgaaaccggcgaaaaccttacacagaagacacaaaaagcctgagacaagacaactacgaactgtcggaggccgagggatgagcaagaccgtaagatgaaatctccaaggaggtgaataacgacataagccgctgtcgacgtccgtccaaaaactgggctggttttcacccaggggggagggagtccacaaggcaacacctccagggaggaaacggcacccgtgggcgtcgatattgccaatcctagaacaggcagggcatgaggtttttgggaactagcaattattgattttgattgttgatgatgaagagttctgactatctacatgggttagtttcttgttcaacaaattcaggaaatagtttcagctcatcagaagtttgcatcgatgtcatcccttctagccatcttctgtgcatttgcttggaacatttggttctgcactaccgttgactataaaatacagctcaacagagctttattttctcacatttctcataacaagttggatatggaaaaccatcractctgaataggagatagcgagctttggaatgattctgagatagctccattttttatcttgtctgaactttggctgtgagctcaaatgattaaatcagtatctttttcatttttttcagccactgaatactttttaatagttttctattattctatggataatgcttgtgtgcatgcttatgatggattgctaattgttttacacgtgcataataactgtaattaactgggggagtgcttcttgaggtagatggaaagctttgctacttttgaagaaaacgagtggataatagagaaattgggtgagacatcatttattctgcgcaactttgagaactggctgagatgtaaacctgggaaatatagtcatcccgtgtgartaacacaaatgagcttcgaaggacaaacatcatgccattgggtcagttctgcagttaaagatagttgtctgaaattgatgaagttcttgactgcaggttgtcttttaagcagtttgtagcttaataaacggttgtgcaggtgccatggtcatactattgatcctgttagaacaaacaagataaaatggatgtgcccaacaactagacaataccacataacttatgatattaccgatagtgatgcgaaaatcagggaatagacagtattgtttcttcttgattcagaaggcgttctccagctttcagcaagcctcatcttctattgattttggcatgattgagcgaacgaagttaacctcgctaaatgaaggtacccaccgctatagactgtaatgatactccctccgtacttataaaggaagtcgtttaggacaatgtttaagtcaaactttaggaatataaatcataaataactcttaagttgttgaatttgaaaataaaaaaattatatgaatagatttgtcttggaaaatactttcataaaagtgtgtgtgtgtgtgtgtgtgtgtatatatatatatatatatatcacttttcaataaatatttttatagaaacaagaagtcaaagttrtgttttggagaccgtgtcactgtcctaaacgacttcctttgcgagtatggagggaatacacattagttactaaattttcagaggcttttgccttaactttgttcaaaatataatggagaactctgttaacaggactcgtaatggggtaatgttgacgtcactcaatgaagctacatgggtcttgcataaagggattgatcagcttttcttttatgcttgctcattgatgaaatgacaggcattaggcctttttattttcaaacatttaatttgctaacattgatgccgtgtacccttagtagtattattatatagtagaacattatttatatcatgttctttggggacaaatttacaccgagtgattatttcacctggtgtgatttgaaattgaggcatattctttttcccgttgcaacgcacgggcacccaactagtcaacaaaagaattattcaatatatatagagaatgcaaattatcacacattagagctcatttagaatgctggaattttacaataatttcacaagaaaagtttaattcccacaaaatacttgcaattgatccccctttcttttcgcgaacgcaccaaaggattgcacgtcagtatattagaaaaaagcagagtttttgttacacaacgtaaccagtcagacgaccattgcatgtggataagggaacaragaamgaaaccaaaagactgctaaagtwaaaaactaccaaaaaaatgttgctcctaaatagatggarggtkgtggcgaagctccactacactcctaataaacccctaaaaacagcgacgccagcagaagaccacaaacggtcttcctgtaggatgactttcagaacccttgagagtgaggaaagagagtaatcaaaaaccctggagtttcgccccttccacaactgccagagaccaggagaattagagagtcgaaacccacacgaagatgctcaggtcgacatgccctagaagtcagccaccagagtcatatwtaagccacggaagcatacgcgcggttacactttcaaaaaagtttagtggcacattacaatttattkggtgtattgccttgtgttaaaggggcacacttgtggatgtacgtgcagtgtgcatggtggttatgtgcatgggccatcgtgtaattgcgaaaaaagtcatataaacctgcattgtacacacaaaatggtgcacatatgtacaaaatgaatccccaaaggtgacacaattaagcatgcatgcatgcacgtaaaacataagtcaaatatatatgttttacttagtttaatttgatcccaaatgaagaaaaatactcatcactcatcagtacacacttctgatagatttagcttcttaattgggcacagctaactagctagctctgcccatttggtctctccaattctccatgagataattaagtagcaatttataagggattaacaaaatgcagcagcacacaaatactatatatatagccacatcagtagtgtctgtctgcataacagcataagatatagaagatgagctgatcatcatatccatggcagcaggccggtgcagaatgaagttcatgaggttcagaagtgaggaggcggcgcgtcggcggcggcggcgccgggaatggcaaggtggtggtggtagccgaggttgagctcggtggggatgatctgctggcgctgcgccgccacggcctgcacctgcgccgccgcctcgaacaggttcaacgggaagaagcacttcatgtccagctgcgccgccgccaccgcgaacggattctgctgctgctgctgcgccgccgccgcagcctgcagctccatggcggccgaccgggccaccgtcacctgctgcagctgctgctcctcctcagcaatctgcaagtgtgcacatgatctctcatcaacgtatagtagagatagatgtgtcgttgatgtagagatatattgttcttttcgtcaagctttatagattaattagctagctatttgttcaaattaatttaaacaaatagctagctaattaatctctgatttgcaaacaagaaattggaagttggttctgatttcttgcagtcacctgatatgtatttaccttggttctgaggtccatgttgtcgttctgaagctcaatctcctgaaatcatgacaagaacattgcaaatgagtaatgctaacaagaattatgcaatcaggtaaaaagaatagaggattaagaaaggagtttgcaatcattgatcagtatgtacaattgtatgtaagatgcaattctagtaacacacatacccttttggccatgtaattgatctctgaagccagcagttcattctgagataaaattaaacaaataaggattaacagttaatttgtacatttttaaggccacttagtaagttaacattgcatcagaaactgaagaattgttcaaacaaagtaaatcaaggtgatcatatatatctaacagcactgagattttgttctaaaggtgacaccatgaggttggtaattgaatgttcatgtgaaaatggtattttatatatagttgtttaccttcctggctctgatctttgaaatgcctttctccaggcggctttcaagttgcttcagctccttcagtgacaggttgctcacattatcgccaaccaggtgcctttcacataggaaaacaaaccaaacgaaaataggtatttccaggtcatcacattgattctgtaaagtaatctcttttcaatattatcatcgatatatacacatgtgtttcttgaatggcagatataaaaattgtgtattagtattaggcacttacttgttggtgttttgcagcatctgaatctggtggcgcagtttggcagactcctgctggtagtattgcttcagacaagacaattaacaagacgatcgatcagatttaattacgtttatcatgtagctctaattgatcagcaaaaaaaaaaagtaacagtaaccttaattgtagtgcaacagaatgactgcattcatgcttttacattgaagtttattttgtgaattttgtttgttctcttcagtcactaactttaaattgcaagccactagccacaaaagggtacacttacagtttctaagaaaagtatactcttaaactcagagaaagacaaatatatggagaacttcagtgcagaattgcagactaggcattaggcaatctccaagtggttcacatactacattaattatgaattcaatcttgtcgtaaagattgatgctgtatagctataacacatgaatgtatataagcacaaagatcaagccataccctgatgaaactaacaaattaatataatgcagcagtcaattacctaccacaaaaagtatataaaatacttaaaatgcaaggcatctatatgctctcactttatatgtatgaatatgccttggttttagaatagtcaccaaattaatttaactgaaactaaggcaaaatgaatagaagaaggtaattaacaaagcagcaacatatatatgggttacctgagcattgacctctatgagaggtgcaccagaagttgagccacaagcatgcgccttcttgtacctgtcaattgtagccttcacactgcagtatatatcccatcagtcgagtggtactctctcaacactacaacataaatactgataattgtgcatgcatggtaatgtagtgtgttcatatatgccaacaagagaagaaatgcaacacacatgactatacatgtcatgaatgcagaaataatgcatgtgaggagcaagcgtttaattacttcagcataaaattgtgcagaagaaaggtagccattggaatgcatgctgtctctagctgcaagaactgtgttgaagtgaacacaagaacggaatgaaatgagtatacacgagctagagagaaagagagatggtcagatggatggccattggcttattaactgatgcacaactttgcaccggagaagagcaaacacagcgaatatgggaggacgttgctgcagtttctagcttggtgcaagttcttctcatgcatgtccatggtgtctatatgtgtatcggtgtatggagaagcaaggaaaaggaaactcttgacagctagtttctagggtgaactatctactgaacatacaacattgacaggagactgagcttccttgctgtgcatgatatgatgtgtgttgtgtgaactgtggagaataaaatatgataaaagatggcagtggctttgctagctgctcaagtactgatagcactgatatatattatttaaaagtttgcatgcatgcatactcatgtacatgtactcgagagagattgcaaatgaatttgacatgtataaaaacaatgagactttgcaaactttaaataattatttgactgcatgcatgaatgaattggaaggggattctaatgtatctttcaaatagcctccccttaatatgtgtgtacatatctaattcacacatctcactttgaaaatgatgagcaatagctaaggaattttccatggaggttaagagagtaactttatttagatacaaaaacaatataatcatgcatgcatgacaaatcaccatatatagtaccatgcatatagtttgaaataaatcttacaattttatttcgtaatctgagtagatgataactgaaaaaagtaagcaagtcttgttacatgcacagatgaaattaaagtccatgcatacatggttaattctttccagcaaaatcaatttagcaagcaggatatataaatggactttagtaaagccttctgaccataagactaagaaaattagaacagaatagtcctttttcaagtaactaaacaggacaacattttcagcattaatcttacagctagctgatgagcaaacatatacatcttgatgagtttttatgataaactctaacatttttcctaaatcatttcacaccttgagttaagtaattcacatatcatctaagaatgtgtataatattaaactcattctaaaatatttaccaagagtcagttttaaccacaactaaacttttactcaataacaaactattagccacaaataaagcaacacaacaagcacgctgagcatgaaatgacacgaagggaaacaaagcaatcagcaagttagtttcaagaactgagtacgaaattaagccaatatatttacagcaagtacatacttgttgttgttggagtactcgtagaggcggccacggctggagaagacgatgagagccacctcggcatcgcagaggacggagagctcatacgccttcttgagaagtccgttgcggcgcttgcagaaggtcacctggcggcttgtcgtgttctcgatcctcttgatctcaatcctgcccctccccatgtcttcttgctctcaactgatcaacaaaaaaggagaccagagatcagatcaaagaacagcaaaaacattgcatgagaagtttgatagatgcagaagagagagtactgatgaaagatctggtaatgattaaagaacagcacaaactctcagctgattaaaaaagagagagagaccggattaaagaaacaactaaaacttgcatgagaaattgatagatgcagaaaagagactgatgaaagatctagtagtgatttacagtactacatcacacgctgatcgatctaagaaattaatgaattcaactatactgagagatctgagatcgtgattcacatagtatgtgtataaagtgatcgatctaacaaattcaagcatgttttatacatgtaaatccaaaaggaataagaaaccagctatagctaaagaggggtaaaacaagagaaaaaagctgaactttgaaagaaaaagatgatttttgctcataaaaaagaaagaaaaagatgatgaaagacttggcggatatggatcaaatttggagactgggacaatatctatcccatcatttgacataagcaaagctcaatcatcgcctatttagaaaggagcctagatgcaagtatagagtgatcgagtaaacaagatctagcaaaagtagtctcaagaaacaaaactttcagatgtgcagagattgctcgaaataatgaagggaagaagcgaaaaagaaagctcaaagaaccagatgggtagatgaatcaagaaggataagatgcaagaacagcacgtctccacaaaaaggaaaaaaaagaaccaaccaaatctgaagaatcatgtttaagaaagcatggaaaagctagcaatttcgatttgcttaactaactatcttaacatatctagctaagaattgaccaaagaaaactcatcacaaagtgagaagcaagaggtcggccgcaggaaactagcttcttccttttctcctgtctcctcacaagatcaaagatctgcctaaggcaagaagagaaatttcaagaaagaacgaaaaaactgaaaccttccaaaagaaaccaggatcactgggccggaaagaatccttgctacataaatagagaaagaagctaggaagaatttccaatctgaacaaagaagcatcaaactggaagccaagcatcacagtttctctttgcaagaactcgaagcacaggaaaagggtttcttttcctcaaagagagaacatacaaacttgaatctaaactgcagctgaatcagtgccttaacaaagaactctacacacacccagataactaaaacacattagcacgcaaagagatatataacctagctaaaattggtcctgaagctgatctgatctttctttctctaccttcgtttcttggagtaggaaaggagagctccagttggtgggttttctgctgctgtgtgaggtgcagaggattaataggagaaggcaaagggaaagcaggaaagagaggaagaagggctagctagctagcttagctgcaaaggccactggccttctttgctatcttgcttacccatttatagctatttagacatctttacatgtatattctttaagcaagaatttataacctctccttttttctatcttgtgtaatttgtgcctagaaacactgatctgcagagaggtatttagttgtttgtactttgtaggcactgctaaagtatgtttagagattggtcgatgtccagaaggctggagttataagcaacctagcaagttatgaaaaaaataagcaactgatcatcccttgttatgtgtttagtacatctgcagaataactgaagtcaacttgccggttaattatcatatatgcatgcctagctagttcttgcaaatgtgtgtgcttaattttggaa

SEQ ID NO: 506 - DNA, 4618 bp, Oryza sativa
  misc_feature (1)..(4618): AB003322 5'-regulatory sequence engineered
  misc_feature (1)..(2183): 5'-nontranscribed sequence
  misc_feature (2184)..(2457): 5'-untranslated sequence
  misc_feature (2458)..(4604): Intron
  misc_feature (4605)..(4618): Exon
cgttgcccagcgaggagcatgcgtaaaatccgcccaagctggtgcttgttgttgccgcgacccatgacggcatccgattctagtattacatgcttgccggcgttatcgagcacacaacgatgttccccgtcgacaccctcaagatgaacatgcaggtcggtgccccaccctgttactcggtcctgtcattggaggccgccttgtctggctaagtagtggacacatgttagccaacatgaacaatagatgacaatatggatgacgccgtgtgcattggtttgagtccaagcatggaaggtggtgtgatgtgaaagttaatttgtcatccctcggtgcaaagcgaaggtatatatgaaaccgggtgtaaagggaaaacaaaataaatctacccgatgttaagtgcaatttactctttatttatttttacttatttgattatgctgtaaccgagttggatggcaaaccacgtatggtgtgatagatttacttccaccattatcctcctttttatctcctacatatgtgtttacagttcgcttatagtatgctgttgtatatgctctcactgcaaactataattaattaacctgaaaaatataacaaaggtcctttcagattgctgccgagtctaagggctcattcggaatgtaggattgaaaaaaatataggaataggaaaaatataggaataggataggaatgcaagtgtaaaacagatgatttgaaaacataggaatttcatgtgaataggtgtggatggagtaaaggaaaaacataggaatctttagaagaaaataggtgcactattacaaaattatcacatactactagtgaattaaacaacattaatcaacctaataatgtgctttagttgcttgatggcatgatttgcctcgttcccacgcgaagggagagaaaaaagaggtcagcatggatgtttttcttcctatgatcttccagtgatatggctagcgtaggaaatttctctatgtatttcctacgaacattttcatgtgatccaaatgacgccacagtaaagcaatccataggaacccaaatccttcatttttcctgtgtttctcctctattctgaacaagccctaaagaaattcaaggaggcacctgaacgccggccaattagtgccagcgcaaacagccgatcgctgagaaaatgtgaataaggcaaagcgcgaactctggaaagcgctcgagagaggtcggccggcgacccaacaacacaccaccaccggcctcgcgcccgcggcgcacacaagatcgccacagcgccgtggtcggaacagcgaatccggccgcctgcaggcacaggcggcagtgccacctccccacccccccaatccgctgcgtttccctctggcctcgtcccttcccaacaaacaaacccgccaccacacggcgcccagcgcccgtgctctcctctcctctcctctacccgcccagcccagccgcccatcccccctcctttccgcggtccttttgctcggttcagcacgcacgcgggcacgcggcacgccatcaccgcgcggccggccgcctgctgctgctacagccagtggagtactgttctgggccggccgcgccgcccgaagccaccaccctttccttttccggaagcctccccaatcctccgccattccccgcatagcgccccatgcccctaccgaccatagcctcccaatcccccatcgcctagctgcttcgccgtttattttaagatttttctttgggttgtgagtaaggcttggtggggcccagctcacggttccttctggcataaacaatgacttgggcctgcccgccccgtggcctcgccatccgacactgtgcctctcatcccgcgattagtatatttttgctgtttttttatgggtgaaaaactgtgtgggctctctcgttgggttgctatccgtccacccgtccattcatcctcgcctttgccagttgcggtgttgcccccctcgctttatttatgtcgacctgccaataggagcaagtccccgtctcgagacaccagccgcgccgcgcctcgcctcgcctcgcctcacctcacctcacctcaccctccgcctcgtctccttcccccctttcctctacccacgcacgccctctctcccatcccagccgtagccgcgccgtgacttgtctcgatcggcggcgaggaggagggcttccgttccctggccggtgggggaggatcaggcgggggggcggcggggagggggaggagatcggtctcggtcgatccgcgcgcggcggcgatcgcgcgggagaggcgggagataaagaggatagagagcgcggcggcgcggcaggtcaccttctccaagcgccggcgcggcctgttcaagaaggccgaggaggtctccgtgctctgcgacgccgacgtcgcgctcatcgtcttctcctccacggggaagctatcccacttcgcaagctccaggtatgctgttctactcccacgcctggatatctctcgactccgcttcgtctcccgcgtttcgatagatctagctaggcgcgtttcctcccccggtctccctttgacttcgatgtctaagatccatccgcctgggctagggtttaacacgggatattttaactagtaacacggatctcaccatttccacccgttcagaaaaatcaatacagttttagaacgactcgtggttactttcgccccctttagatgtaggggatttactgtagtgtatgtagtctgcacctgtacttttgcagattattttcgaggtgttctttttttggtgcatgagtagcccatcttatttggccattcctactggaaatatcgtacgacaactcctgttatttgctgtttatgtgcgcgtggagttaatcgatgtgtgtgtcgcagtagtgctgtgttggtgataaagctagctagctctgctgatagcctacggtcgtacgtgtgattttatgtgctgatgcgtcgcgttttaccctctgatcaatggggggtctcgtgttttgtgcacggaaaacctcgcttcctgttgttgttttcttttgcaatgtgttaaatcattgcagaactgttgtttgatgagaaatatcctgttgttgttttcttttgcaatgtgttaaatcattgcagagctgttgtttgatgagaaatatcctgttgttgttttcttttgcaatgtgttaaatcattgcagagctgttgtttgatgagaaatatggtagtctcctacacgtatcgttcgtcatatccatctcgccttatttgaggacaatgctttcctcattgcaatcccttttctgcgccttaattaggtattatactgttatgctgtatcgctatatgtatttacatcgtgctgttcagtcttgtttgcagctgtacaatatgagtttgtttatgatatactcgccctttaatttgttactcatgataacaaactgaaataatttactcatagatctttatcttgcatgtatccatttcgaaaagtttcctttgtcttaataaaagaaatgttgtactagtacatatctcattatatcttcatgtacctgtccatcacttcatcgtcactatatatatatatatatatatatatatatatatatatatatatacaaacaaacaaaaatggtgttagctagaattctcttttgctgagaaagtatcttaattattatttcaggtttgttaatttgcatcaatttataataccttaacttcttttacttcaaacagggattttgttaaacaattgcaatttgttttatgtaaatttaagtacatcatttttcatttcttcgatgaatgtagattatctcagataagataacctgatacttcctttactcttctacatatgaatttgtttagttcatatcatatataaaagaatggacggagtatgttttttatggttttacatcagttgtcagtagcacaacttaagcaaggattcaacttctcttgatgtacttttttagaaatgtgcacatatacaacttaatttcatccatgctacaatttatttttagttcatttctacaaactagagttaagtgttggaagaagataaagaataaactgggatggctggtactgttatatgtggacaatcattcagccttggtagcatttaaatatgttcattttacctggtagtgagtactggtagaatccataaatcgtgcttctatcaataaaaaatcacactctataatattaattcaattttggagctgcaaggcttggtttatctaagaagttactatttataaactaacatttgtcttgattatttgttctacagctggacaatgtattgatccttcttctacattggatgccataagattttcttactgttttctttttcagtgcttaattcctatatttctgtcaatatcaacttacccgtgttaatttgaccagggaaaaccactttcatttctcaagattactcctgcaatgttatagacttgtagtctacttggcccgtgcctttataattatgaacattcatgtataatttatgttctattttcgttttatctgatggtctgtggcctactgtggtattgatgatgccttctgttggacagtatcaccaccatgg

SEQ ID NO: 507 - DNA, 930 bp, Oryza sativa
  misc_feature (1)..(930): AB003322 3'-regulatory sequence engineered
  misc_feature (1)..(320): 3'-untranslated sequence
  misc_feature (321)..(930): 3'-nontranscribed sequence
ctgaaaggaaaaaaaaagcatccttgcagatctggttggagtcgttgcggcatccaggggagaaacgcttgtgttattcccaaacccagactgcaataatataatcttgcgttggaagcgagatcagttaacctgatttatcatccttgtggctgcatgatgcgatgttccgcttgtactgttcgctaggatcttgactaaactttgagatctatgtgccgtttaattatcccatcgctattggcactccttatgcgatacatcatatatgcactttgttgctatcttaattatgatgcgtcttttgcagcgttctaagtatgatcttgcgctatcttttgcgctatcttgcattcttgcgtaatatatatacattgtcgctgtcgttagatttcagttcttagctagcagccactagttggtgttaatagcttttccttttcctttcccttttcttttcatgatttacctgtcacgctatttcgcgggctgcaatttgttgcttgagatatgctctgcatggaagaacactatgcagatgcgctccagcattgattttcattatgggatactaacggggtatatgttgctgtgtgctacagatgtacagcgacgcagcagaaaaggtgacagctgcagtatatgtactgatctttccatttaatattaaaaaatctatatctttccgtttgctcgcatatccttctattttggattaagagcctcaccgtttgacttatctgcggaataagctaaataatatgtgttcttagcgatgtaaaagcaaaggctaaaaaaattaatgtcgatgaaaaaaccttaaaatcggcttcaaatttaaggttaaaaatttagattttggttaataagtataagcataagtgaaaagataagaccgtaaatggttggatttcagttgccagatttatt

SEQ ID NO: 508 - DNA, 32 bp, Artificial sequence
  Primer
  misc_feature (1)..(32): AF095646-1
tgttgcatgcatgcgtactggtgatggccgca

SEQ ID NO: 509 - DNA, 32 bp, Artificial sequence
  Primer
  misc_feature (1)..(32): AF095646-2
aatgtcttgtttattctgcaaacaaaaatagg

SEQ ID NO: 510 - DNA, 30 bp, Artificial sequence
  Primer
  misc_feature (1)..(30): AF095646-3
tgaagtccaagcttgctaataaaaacgctg

SEQ ID NO: 511 - DNA, 23 bp, Artificial sequence
  Primer
  misc_feature (1)..(23): AF095646-4
aagggtagggctgcacgaaatgc

SEQ ID NO: 512 - DNA, 28 bp, Artificial sequence
  Primer
  misc_feature (1)..(28): AF095646-5
caaaagttgagggattggatcgatcaga

SEQ ID NO: 513 - DNA, 34 bp, Artificial sequence
  Primer
  misc_feature (1)..(34): AF095646-6
gattggatcgatcagagatcgggaggggaagggt

SEQ ID NO: 514 - DNA, 30 bp, Artificial sequence
  Primer
  misc_feature (1)..(30): AF095646-7
gttttgtttccttcgatgggatgcgtattc

SEQ ID NO: 515 - DNA, 27 bp, Artificial sequence
  Primer
  misc_feature (1)..(27): AF095646-8
gaaggcgtacgaggtctccgtgctctg

SEQ ID NO: 516 - DNA, 31 bp, Artificial sequence
  Primer
  misc_feature (1)..(31): AF095646-9
cccttccttacccatgctggtaacaaatatg

SEQ ID NO: 517 - DNA, 43 bp, Artificial sequence
  Primer
  misc_feature (1)..(43): AF095646-10
atatatctcgagcggaccgtgttgcatgcatgcgtactggtga

SEQ ID NO: 518 - DNA, 38 bp, Artificial sequence
  Primer
  misc_feature (1)..(38): AF095646-11
atatatccatggtgggtttattctgcaaacaaaaatag

SEQ ID NO: 519 - DNA, 38 bp, Artificial sequence
  Primer
  misc_feature (1)..(38): AF095646-12
tatatagagctcagtccaagcttgctaataaaaacgct

SEQ ID NO: 520 - DNA, 38 bp, Artificial sequence
  Primer
  misc_feature (1)..(38): AF095646-13
tatatacccgggcggtccgaagggtagggctgcacgaa

SEQ ID NO: 521 - DNA, 526 bp, Oryza sativa
  misc_feature (1)..(526): CL019873.131
agagagagagagagagagagagagagagagagagagagaaaagaaggcaaggagcactccggccagcacagccgatggtacgagagcatggctagctagccgagctacttagctactacatccatgatccatccatccccaacaaacggagcaagactgcaagggagagggagagagagggaagcttgcaggctgcagctaactagctaggcaaggagagagaggagatagatcaagaagagattttgagaccgagagagagctagagagagatcgatggggcgagggaaagtagagctgaagcggatcgagaacaagataagccggcaggtgacgttcgcgaagaggaggaacgggctgctgaagaaggcgtacgagctgtccgtgctctgcgacgccgaggtcgccctcatcatcttctccacccgcggccgcctcttcgagttctccacctcctcctggtactactaataattctctcttgcaagctctcgccccttgcagagaattcatatatatctcgccc

SEQ ID NO: 522 - DNA, 30 bp, Oryza sativa; identical to SEQ ID NO: 496
  misc_feature (1)..(30): OsMADS8.P1

SEQ ID NO: 523 - DNA, 29 bp, Oryza sativa
  misc_feature (1)..(29): OsMADS8.P2
ccattttttgcgaaatgccaaatcctggc

SEQ ID NO: 524 - DNA, 4283 bp, Oryza sativa
  misc_feature (1)..(4283): AF095646 5'-regulatory sequence
  misc_feature (1)..(2001): 5'-nontranscribed sequence
  misc_feature (1)..(4283): n is a, c, g, or t
  misc_feature (2002)..(2320): Exon
  misc_feature (2055)..(2055): n is a, c, g, or t
  misc_feature (2321)..(4268): Intron
  misc_feature (4269)..(4283): Exon
tgttgcatgcatgcgtactggtgatggccgcatagcagctggtaactgaacagtggctcggagagggacgtctcgtcgtgccgccctgtgaatgcctgtacacccccgagcaccgtaaattccgagctagctagcttggggacgttgaaagcgtcgtcagatctgtattcaaggcagttgatcgaccatgtacttctctgctcctttatatggggttacagtataccgtatagctccatgcatgcatggtggaaacgatttgcgtggttgctgtgcaagtgcatgtacatgtgcgtgtgattgtttgtaccctgttcctggtttcatgcgattagatggccgagtgcacatgatgagctagcctatccgtggactacaacacatgcgatgagcatgtcagatggccgatggccagggaacagctggggacttggccacgcctcggagagggctaatcgagaaaggctagctaggtataggcgtatagctactacgagcatctacatgatcacactgcacatatgtacgcgtacatggtatttgcatatcagtccatacgagtaaatgtgtagccatgcatgaacttatgaattgagccctctctcaactgtgtcactttgtgatggagtattttattttttcaattttttacgcactgacgggcttcgcgggcctcagattctccagtcacgtgcaaaggatacgtacggcgtggcaggccaccggccggtttcctggcacacggcccagtcagtggctcaggcgagggaaatccgcgtacggtgaaacccaaccccgatgccggcgataaatccgtttgctgcttgacatgagtgggccgcctgagaggacaaccgggatccagttagcgagtcaatgacgctgacacttgggtcccttctcgcctggacccacatgtcagtgacagatgatccacgttccgagaagatgacgtacggtttcccgtggatttgcgctaccaggacgcgtcaggttacaaaggggctttgttaggctatgttcttcctagttttcctaactcacatctatcgtttttcacgcatataacttttaaacagctaaaaacgctgtgctttttgcaaaaaaaaattatacgaaagttgttttaaaaaatcatattaatctattttttaaataaattagttaatacttaattaattatataataatacgtgtttcgttttacatgatgagcgcaatccctcctcccgaacgcaacctaaggggatgtttgggtccaaacaccccccctaatacttatcatgtcatggacgaacaaataatggcaaatagcaagtcaacaaagctcaaaaactggaatttctcaggcaccggccagatgtgtcagattaggacttcactacaatcgacgtgccataattcccagcagttaatgctttggcgggaagattaatcacgtgtgtgtgttttacttatttttctggggtgctctagggctcctgtgaatatctctggagactggtcgtgggtcgacagaaccactgaaccagcagggtgccatgcagccagtgagcattacatgcatggtttggtctagttctaggagtgtactacatgtgcgtgcacactgcaagtgtagccagagttcatgtatggatcattgcacatgttgttgtgtggtctcatgcatgcagatgacgatcatgacattgcgtgtttgaatccaggttgaggcatgtgcattgcacatttgcactggctgccgtgttcacctgttcgggctcgtgcttaccagctagggtaatgccgggcatgcaggtactagctgctcctggcacccagttactgcatgcccggtttcctcgtcgtcgcaagttacctgtccttaaagttggtagctcaagagagaggccaaaaagatgaaggaaagcggcaaccaaatttaacaccgcaacagtagtactactagctgggcccctttgggatgtctcctctctccactgatattcctcctcttcctagatcatatctcatcccatcatcggtcatattctcctcagcttcatgttgctnagctataggcgaatggttgacaagagtactagttagcttaataatatagctttgcaaaagttgagggaatggatcgatcagagatggggaggggaagggttgagctgaagcgcatcgagaacaagatcaaccggcaggtcaccttctccaagcgccgcaacggcctcctcaagaaggcgtacgagctctccgtgctctgcgacgcggaggtggcgctcatcatcttctccagccgtggcaagctgtacgaattcggtagcgccgggtaagcgtgtgcatgatccgttcagtaccctaatcgtatgtgattcttgcagatctggtgattaatttctctcttccctttggtttgttttgtttccttccatgggatgcgtattctcgtttgcttcctcagcttaaatccgaaattgtttcttagattttttgttaccaagtatatatatgtgctcgctggtttattttgctatatggttttttgtttctcgctagcgtgcatgtgttttcatacatcttttaggcttaggtaatcttgccggatgtatgcctagctcttgctacttgcatacttgggtaatcttttcataatgaaaatcctccagccctaactcaataaagcacataatatctcttcttcttcttcttcttcagaacctaaagagcattgatttctttcattcgtgcgtgtgcccggcgtgcgcatgtcaggagcagctaggtatatgaggctctgaggcgcaagttttctgattgcaagagtgacttgaaggggaaagtgatggggtctgctgtttccatttagatgccgcaccaagaactttgtttaaatcttttttttcagaattattgcctaatttgatatccatatatttcattcctgcaagtatataacatcttctcttgccatctctcaggtaaattatattacatatgaaccatgcatatgcctctcttttcttttgatgcatttgtgttttcctgaaaggttcgtgttcccgtttaaataaagctttcagatttttttcctgataggtacatgagtttttttttcatttatttgattaaaccctcaaacattatcatcactttagctgcatatatatgaattcgatctttcaaatctcttatgtgtatacgctcttttgcaagattttgtgattctggtattattatttttttcttgttgcattgcctcttgctaatacatgaaggtaaccgagaggggcttatgcacattttgagttgaatgttagtaattgctatatgtattgacgggaaaatcataaatatatatagacgaaaaataactgtgttgattgaaatgcatggatcgaattgaacaccgtttagttgtggaaattcttttatttcttctccggtgatcagtgtgtagggcttctctccagggaccatcagagcaggcgggccatgaaaaaaattttgaataaagtaaatacattacgaaagagttttgtgttattgtgaccggcaactcttgttgctgaacttgctgcttgaacctggtatgcacatgaatatggtggtttttctttttttcatcatagtttattttgcaacatttactttggagtcgccaagaacacacatataaagctttacttagaaatattctttttatttgctaataagtgattcggataagcatatgaataagcgaaacaatgaggctttgtgtccgaattagagcatcattaaacaatttctgaaaacaatttcttcagtagcgatgatcgaaagggattcgttgaactctaacaattattaaaattgttcttgaccacaaattcacctggccatatgattatcattacctattttctgcaattaaatttatgtattttcattctgttatattagtctcctgctgtttaaaattacatatcattctaccttgtcctaatttatgtcaaacatttctatccttgacagtcaatttctagaaatttgtataagttaacaacatgcgaattatatattacaaaagtatttctcatgatgaatctaaaaacataaatcttatgatattaaactatatgaaattttaaattttgatggcaaaacgtacaaatgtttaacttagaacaaaactagaatgcaagtaatttcaaatgcagggcgaagagtagattttattgcattcggctttatgtatgtgagtaagtaacatatcctaaacctatttttgtttgcagaataaacaagacatt

SEQ ID NO: 525 - DNA, 971 bp, Oryza sativa
  misc_feature (1)..(971): AF095646 3'-regulatory sequence
  misc_feature (1)..(279): 3'-untranslated sequence
  misc_feature (280)..(971): 3'-nontranscribed sequence
tgaagtccaagcttgctaataaaaacgctggcgtgctataatatatagttcggcaaatgttgaaacacatgtgttctcagtatgtatatttctcccctatccggtggtactcttagcacgtacctatgagtgtatgtttgtacgttatctatactctatgctaggcaaccctatactattatggtaagacgtctatcttttcaatctatctatacgtaccatactaattggcaaattttgtgtagctaccggattaagtgtgctacctactgtaaagatcccaagagttttgcatgaatatatttggctagagcgatcatttaattctatttattcaaaattttctaatgtgcacaatgggacttgtgtgaattgttagaccattgttatagaacacctaaattcgaagaaaccttcggtagcatatgtcctacagcgcaaacacaaacaaaacagagcatacacaaacataacacaaacctattcatgccctcaactaccgttatttcccttaggcggtgactcttatatttgaaggtatgaaaatttgaaaatggggtcaatatttaaattatggtgtacaaaatatgaggtttaagaaggcaactcgtttttttcgagcttgttttatttagtaaagggtttttaaaatcttcaattcgactagttttacgtactaaaatacatgactagtaattaaatttggactagggtgttagataggtccataatatcgtaaactgcacatatatcacccatatatgattaccaacgtggttgtctacggaggccaaaagttcacattcaacccccttccttacccatggtggtaacaaatatgcgtttaacccctccgagtttgttaccaactatgacaaaaagatgccgcacctcgatgtcccctcccctccttcgctgcacttcactgtctccttcccctccctagctgcatttcgtgcagccctaccctt

SEQ ID NO: 526 - DNA, 4312 bp, Oryza sativa
  misc_feature (1)..(4312): AF095646 5'-regulatory sequence engineered
  misc_feature (1)..(2029): 5'-nontranscribed sequence
  misc_feature (1)..(4312): n is a, c, g, or t
  misc_feature (2030)..(2348): Exon
  misc_feature (2083)..(2083): n is a, c, g, or t
  misc_feature (2349)..(4296): Intron
  misc_feature (4297)..(4312): Exon
tgttgcatgcatgcgtactggtgatggccgcatagcagctggtaactgaacagtggctcggagagggacgtctcgtcgtgccgccctgtgaatgcctgtacacccccgagcaccgtaaattccgagctagctagcttggggacgttgaaagcgtcgtcagatctgtattcaaggcagttgatcgaccatgtacttctctgctcctttatatggggttacagtataccgtatagctccatgcatgcatggtggaaacgatttgcgtggttgctgtgcaagtgcatgtacatgtgcgtgtgattgtttgtaccctgttcctggtttcatgcgattagatggccgagtgcacatgatgagctagcctatccgtggactacaacacatgcgatgagcatgtcagatggccgatggccagggaacagctggggacttggccacgcctcggagagggctaatcgagaaaggctagctaggtataggcgtatagctactacgagcatctacatgatcacactgcacatatgtacgcgtacatggtatttgcatatcagtccatacgagtaaatgtgtagccatgcatgaacttatgaattgagccctctctcaactgtgtcactttgtgatggagtattttattttttcaattttttacgcactgacgggcttcgcgggcctcagattctccagtcacgtgcaaaggatacgtacggcgtggcaggccaccggccggtttcctggcacacggcccagtcagtggctcaggcgagggaaatccgcgtacggtgaaacccaaccccgatgccggcgataaatccgtttgctgcttgacatgagtgggccgcctgagaggacaaccgggatccagttagcgagtcaatgacgctgacacttgggtcccttctcgcctggacccacatgtcagtgacagatgatccacgttccgagaagatgacgtacggtttcccgtggatttgcgctaccaggacgcgtcaggttacaaaggggctttgttaggctatgttcttcctagttttcctaactcacatctatcgtttttcacgcatataacttttaaacagctaaaaacgctgtgctttttgcaaaaaaaaattatacgaaagttgttttaaaaaatcatattaatctattttttaaataaattagttaatacttaattaattatataataatacgtgtttcgttttacatgatgagcgcaatccctcctcccgaacgcaacctaaggggatgtttgggtccaaacaccccccctaatacttatcatgtcatggacgaacaaataatggcaaatagcaagtcaacaaagctcaaaaactggaatttctcaggcaccggccagatgtgtcagattaggacttcactacaatcgacgtgccataattcccagcagttaatgctttggcgggaagattaatcacgtgtgtgtgttttacttatttttctggggtgctctagggctcctgtgaatatctctggagactggtcgtgggtcgacagaaccactgaaccagcagggtgccatgcagccagtgagcattacatgcatggtttggtctagttctaggagtgtactacatgtgcgtgcacactgcaagtgtagccagagttcatgtatggatcattgcacatgttgttgtgtggtctcatgcatgcagatgacgatcatgacattgcgtgtttgaatccaggttgaggcatgtgcattgcacatttgcactggctgccgtgttcacctgttcgggctcgtgcaaaagttgagggattggatcgatcagacttaccagctagggtaatgccgggcatgcaggtactagctgctcctggcacccagttactgcatgcccggtttcctcgtcgtcgcaagttacctgtccttaaagttggtagctcaagagagaggccaaaaagatgaaggaaagcggcaaccaaatttaacaccgcaacagtagtactactagctgggcccctttgggatgtctcctctctccactgatattcctcctcttcctagatcatatctcatcccatcatcggtcatattctcctcagcttcatgttgctnagctataggcgaatggttgacaagagtactagttagcttaataatatagctttgcaaaagttgagggattggatcgatcagagatcgggaggggaagggttgagctgaagcgcatcgagaacaagatcaaccggcaggtcaccttctccaagcgccgcaacggcctcctcaagaaggcgtacgaggtctccgtgctctgcgacgcggaggtggcgctcatcatcttctccagccgtggcaagctgtacgaattcggtagcgccgggtaagcgtgtgcatgatccgttcagtaccctaatcgtatgtgattcttgcagatctggtgattaatttctctcttccctttggtttgttttgtttccttcgatgggatgcgtattctcgtttgcttcctcagcttaaatccgaaattgtttcttagattttttgttaccaagtatatatatgtgctcgctggtttattttgctatatggttttttgtttctcgctagcgtgcatgtgttttcatacatcttttaggcttaggtaatcttgccggatgtatgcctagctcttgctacttgcatacttgggtaatcttttcataatgaaaatcctccagccctaactcaataaagcacataatatctcttcttcttcttcttcttcagaacctaaagagcattgatttctttcattcgtgcgtgtgcccggcgtgcgcatgtcaggagcagctaggtatatgaggctctgaggcgcaagttttctgattgcaagagtgacttgaaggggaaagtgatggggtctgctgtttccatttagatgccgcaccaagaactttgtttaaatcttttttttcagaattattgcctaatttgatatccatatatttcattcctgcaagtatataacatcttctcttgccatctctcaggtaaattatattacatatgaaccatgcatatgcctctcttttcttttgatgcatttgtgttttcctgaaaggttcgtgttcccgtttaaataaagctttcagatttttttcctgataggtacatgagtttttttttcatttatttgattaaaccctcaaacattatcatcactttagctgcatatatatgaattcgatctttcaaatctcttatgtgtatacgctcttttgcaagattttgtgattctggtattattatttttttcttgttgcattgcctcttgctaatacatgaaggtaaccgagaggggcttatgcacattttgagttgaatgttagtaattgctatatgtattgacgggaaaatcataaatatatatagacgaaaaataactgtgttgattgaaatgcatggatcgaattgaacaccgtttagttgtggaaattcttttatttcttctccggtgatcagtgtgtagggcttctctccagggaccatcagagcaggcgggccatgaaaaaaattttgaataaagtaaatacattacgaaagagttttgtgttattgtgaccggcaactcttgttgctgaacttgctgcttgaacctggtatgcacatgaatatggtggtttttctttttttcatcatagtttattttgcaacatttactttggagtcgccaagaacacacatataaagctttacttagaaatattctttttatttgctaataagtgattcggataagcatatgaataagcgaaacaatgaggctttgtgtccgaattagagcatcattaaacaatttctgaaaacaatttcttcagtagcgatgatcgaaagggattcgttgaactctaacaattattaaaattgttcttgaccacaaattcacctggccatatgattatcattacctattttctgcaattaaatttatgtattttcattctgttatattagtctcctgctgtttaaaattacatatcattctaccttgtcctaatttatgtcaaacatttctatccttgacagtcaatttctagaaatttgtataagttaacaacatgcgaattatatattacaaaagtatttctcatgatgaatctaaaaacataaatcttatgatattaaactatatgaaattttaaattttgatggcaaaacgtacaaatgtttaacttagaacaaaactagaatgcaagtaatttcaaatgcagggcgaagagtagattttattgcattcggctttatgtatgtgagtaagtaacatatcctaaacctatttttgtttgcagaataaacccaccatgg

SEQ ID NO: 527 - DNA, 968 bp, Oryza sativa
  misc_feature (1)..(968): AF095646 3'-regulatory sequence engineered
  misc_feature (1)..(276): 3'-untranslated sequence
  misc_feature (277)..(968): 3'-nontranscribed sequence
agtccaagcttgctaataaaaacgctggcgtgctataatatatagttcggcaaatgttgaaacacatgtgttctcagtatgtatatttctcccctatccggtggtactcttagcacgtacctatgagtgtatgtttgtacgttatctatactctatgctaggcaaccctatactattatggtaagacgtctatcttttcaatctatctatacgtaccatactaattggcaaattttgtgtagctaccggattaagtgtgctacctactgtaaagatcccaagagttttgcatgaatatatttggctagagcgatcatttaattctatttattcaaaattttctaatgtgcacaatgggacttgtgtgaattgttagaccattgttatagaacacctaaattcgaagaaaccttcggtagcatatgtcctacagcgcaaacacaaacaaaacagagcatacacaaacataacacaaacctattcatgccctcaactaccgttatttcccttaggcggtgactcttatatttgaaggtatgaaaatttgaaaatggggtcaatatttaaattatggtgtacaaaatatgaggtttaagaaggcaactcgtttttttcgagcttgttttatttagtaaagggtttttaaaatcttcaattcgactagttttacgtactaaaatacatgactagtaattaaatttggactagggtgttagataggtccataatatcgtaaactgcacatatatcacccatatatgattaccaacgtggttgtctacggaggccaaaagttcacattcaacccccttccttacccatgctggtaacaaatatgcgtttaacccctccgagtttgttaccaactatgacaaaaagatgccgcacctcgatgtcccctcccctccttcgctgcacttcactgtctccttcccctccctagctgcatttcgtgcagccctaccctt

SEQ ID NO: 528 - DNA, 30 bp, Artificial Sequence
  T6PP-EC-5
  misc_feature (1)..(30): T6PP-EC-5
catggaccatggatttgagcaatagctcac

SEQ ID NO: 529 - DNA, 30 bp, Artificial Sequence
  T6PP-EC-3
  misc_feature (1)..(30): T6PP-EC-3
atcgcagagctcacactgagtgcttcttcc

SEQ ID NO: 530 - DNA, 41 bp, Artificial sequence
  T6PP-QC
  misc_feature (1)..(41): T6PP-QC
ctttattatgctggaagtcatggtatggacataatggcacc

SEQ ID NO: 531 - DNA, 1116 bp, Oryza sativa
  CDS (1)..(1116): OsT6PP-3
atggatttgagcaatagctcacctgtcatcaccgatccggtggcgatcagccagcagttgttgggcggcctgccttcaaatctgatgcagttttcagtcatgcccggtggctactccagctctggcatgaacgttggtgtcagtaggctcaaaatcgaggaagtccttgtcaatggactgcttgatgccatgaaatcctcgtcacctcgcaggaggctgaatgtagcatttggcgaggacaattcatctgaagaagaagaccctgcttacagcgcttggatggcaaaatgtccttctgctttggcttccttcaagcaaattgtagccagtgcacaagggaagaagattgctgtgtttctagactatgacggcacactgtcgcctattgtggatgatcctgacaaagcagtgatgtctcccgtgatgagagctgctgtgagaaatgttgcgaagtacttccccactgcaattgtcagcggaaggtcccgcaataaggtgtttgaatttgtaaaactgaaggagctttattatgctggaagccatggtatggacataatggcaccttcagcaaatcatgagcacagtgctgaaaagagcaaacaggccaatctcttccaacctgcacacgactttctgccaatgatcgatgaggttaccaagtccctcttgcaagttgtcagtggaattgaaggtgcaactgttgagaacaacaaattctgcgtttctgtacattatcgcaacgttgcagagaaggattggaaactggtcgcacggctcgtaaacgaagtgctggaggcttttcctcgtctcaaagtaaccaatggacgaatggttttagaggttcgtccggtgatcgactgggacaagggaaaggctgtggagtttctgctccagtcactcgggctaaatgactctgaaaatgtgatccccatctacattggagacgacagaactgacgaagacgctttcaaggtacttcgacagcgaaattgcggttatggaatactagtttcacaggttcccaaggaaactgaagccttctactcgctgagagatccatctgaagtgatggagttcctcaatttcttggtgagatggaagaagcactcagtgtga

SEQ ID NO: 532 - protein, 371 aa, Oryza sativa
MDLSNSSPVITDPVAISQQLLGGLPSNLMQFSVMPGGYSSSGMNVGVSRLKIEEVLVNGLLDAMKSSSPRRRLNVAFGEDNSSEEEDPAYSAWMAKCPSALASFKQIVASAQGKKIAVFLDYDGTLSPIVDDPDKAVMSPVMRAAVRNVAKYFPTAIVSGRSRNKVFEFVKLKELYYAGSHGMDIMAPSANHEHSAEKSKQANLFQPAHDFLPMIDEVTKSLLQVVSGIEGATVENNKFCVSVHYRNVAEKDWKLVARLVNEVLEAFPRLKVTNGRMVLEVRPVIDWDKGKAVEFLLQSLGLNDSENVIPIYIGDDRTDEDAFKVLRQRNCGYGILVSQVPKETEAFYSLRDPSEVMEFLNFLVRWKKHSV

SEQ ID NO: 533 - DNA, 15978 bp, Oryza sativa
  misc_feature (1)..(15978): OsMADS6-OsT6pp-3 expression cassette
cggaccgctaggacgatggtgtgatgtgggaacacgaagaaaacatgaggaaaaaatattaaaatgaatttcccacttaaaatgcatcaaataaaaaaaataaagaaacgaccgggaatagacacagggtttgtgaactagctagggcaaacatcatatggtcccttgctgatgcacaagtacattgagatgtcatttcaattctgtgcatcatatgcatgtggtcccttgctgaatattactcttgaaatatctaccagtgccaatctattgcatgacttaattaattcacaggttttgttgattacattattagtaagcttgagagcacaagctcaatggatttttctataaatggggatcattttgcaattttctttgtcgtgcaaagttagccttctttattactacttctgtttttaaatatacgatcctattgacttttggtcatatatttaaccatgtatcttatttagatagtttgcgcaaatatatataccttcaatgataaaattagttacaatgaaacaaatgatatttacgcaattctttttactaaacaagtcacaagaagtacctgcagcaatatatgttggaaccgtgcagtagatcgagcctagctacgcaaaaaaacaaaaagagaaaaaaagggaaaggaaaaacattaatcatgcatgagcagtatgcccggcaactggaatttgtcaaagatatggggagaggagaataatacaagtactactactacctagctctaccatgcatatgcacccaaaggcaaactggattattggataaagcacagatgctggcaaaacaatccttaagcctcccctccctgcttctttatttttgggcagcctctaccggacggtgccgtggtccattggaccagtaggtggcgacatacatggtttgggttaagtctaggagagcagtgtgtgtgcgcgcgcaagagagagagactgtgagtctgggagtagccctctcccctcctttggccatcttcctcgtgtatatgcatatatgcatcatcgcaacggtgtatatttgtggtgtggcgggtgtggcattggattgcccccattttggctcgtgcttcccagttagggtaaaacctgtggtaaacttgctagccccacgccaaagttacccttctttattgttgaaagggagaggaggtgtgtgaattgtgatggagggagagagagagagagatagaaagagagatgtgtgtcaaagcaagcaagaaaccagtttcacaaagagctactactagtactagtgtactactgtggtacagtgcccaatgtcctttctccggactcgactccactaatattctcctcttctcgcgcggctcgttatattctcgtcatcattggaggctttagcaagcaagaagagaggcagtggtggtggtggtggaggaggagctagctagcctgtgcttgctgatcggtgctgagctgaggaatcgttcgatcgatcgggcgagtcgacgaggggaagagttgagctgaggcgcatcgagaacaagatcaacaggcaggtcaccttctccaagcgccgcaacggcctcctcaagaaggcctacgagctgtccgttctctgcgacgccgaggtcgcgctcatcatcttctccagccgcggcaagctctacgagttcggcagcgccgggtataattaatacagacacaacaacacacacaaccaacaaaccagcatcaatttgaacctgcagatctgctgttttctctgatcaattgcttctttttttttgttcttttttgtttcttttatctgctgcaacggcgtcctgctcctctggggtttctcgttttctttttcatttatttttagcaggtgccaagtagccgagctactatacttacctggccatgttaattattttattccgtctgtctgtgtgtgtctgtgcatactactatagggacatggcgcggtgttcttataaaccgggaggccggatccctaactagcatgggaggatatcttttcagcggatctatacaaaccctactcctgctgacctctttcttccagtttctccgggtcttccttggattattattgcccatcttccgggttgtgcgtgtgtcagagacagctcgaacgataaatttctcaaaaccagtactagagagggtgtgttgtgtgtgagaactgagtggagagttagcatgaaggctgcaaactagaaaggaaggtatgttctttcctttttgatccatcaggggagccccttctggtattaagatctttccggcacattgattttcatactttgtgatgaccctggaagaatcggcgtagcagcgtagcaccgctccattttggtcttaccctcacctccccatgctatgaactgatcaatttcattgttcttcatcacccttctcctagctttccacttccttcggatctcatgccatgtttctcagcatgaatcaaatttaattcgtgttttctacttccatatatactggaagaaatttaattagatctatttttgctcgggaggtcttcatactttgagttctgatgccatcaccttatttcccccccccccttctcttgttctatcttcttcctcatcttggcttgatcattttgatctgtcagttatagcatgatgcattctcaatttgactgtatgtaagttcaaccggaaatatgttgaatggattttctatatatcaacacttgatgtcaggcctgcatctgtttcgcttgtggtggtgtggccaaaattgtctatatttgatctttgctcttctttctcctcatttcatgacgattcctactacggcttaaaccattctttattctttactaatcatggatgttgcttgactcctagttgtttcgtactagctcaacttggagatcttttcattatttgcctagttggtgggtacgtttgtgacagatctaaaatggtgcacgaaaagttttacttattatgaaaaaagggagcttaacagggtaatttctctatttattcgtgatgacattttttccttgataagggggattttttataatctgcactcacatgtttatatgtaaaatctagctcttttgttttgtttttggcatatttcccgctaagtatagagtttatgtggataacattataacttttcaagatccaatccacatctttgattgtgaaaatcatacaatagggaaaatcaactgaagggttaattagatgctatatgcatatatatatatatgtgcgcgcgcgcgcgcctgaatttaactatgtatgcatccaactgtttcattgaaaaagatttgatatttttcagtctattctttttcgagtatatatttaatatgtttcaatctgttttgaccattataagataaagcctatattcaccaggcatttgagatgatcttttcatgcatgaaaaagctgttgttatcacttcaactaaccagacgatctaacatgtatttgtataagaaacagaccttgatttccttctgtaaaatcatgcatgtgttcgttttgaattggagtcggcgcgcctgtgttttgaccgtcaggaaagtcttttttttccctgaatagtcaagggtctatacttcttgaagcaattgggacactaatcaattattgtttatacctcggaccatcttttccttcttcacaccactaatcagtttatgccttggaccattaattgtgttgttcacaagcttcttgtttatggtttacaaagcattcgcctagatttgtgtgtgtctctacacatcgatcacttttaaatacttgtcgctttcagttattcttttaacgtttggttatttatcttatttaaaaaaattatcgtattattatttattttgtttgtgatttactttattatcaaaagtatttcaaatatgacttatctttttttataagtgcactaatttttcaaataagatgaatggtcaaatgttacaagaaaaagttaaagcaaccactaatttagggcggaggtagtaaaacctagttattgtaaccaataattttatcaatctataaatgcaacacaaagtcacttcgtgatatctcacacaaagccacttcaacgatgaaagctgactgcatgttttatcaaaacacatgtgatcagtttgttggatgaaaaaaattatctatgtcataaatcaagagttataatataagcttctggctctacaagtaacatttctatgttttttttttacgttcttacatactatgttttgccaaaaaaaacatgatcattttgttggacgaaaagaaatagtaaatatagagtgacctttgatatcattataatataagcttctgcctctataaataacatctatgcactttttacgtcgtagtaatttgatatatgagaaatttacatataacatttttgtgcagcataaccaccatggatttgagcaatagctcacctgtcatcaccgatccggtggcgatcagccagcagttgttgggcggcctgccttcaaatctgatgcagttttcagtcatgcccggtggctactccagctctggcatgaacgttggtgtcagtaggctcaaaatcgaggaagtccttgtcaatggactgcttgatgccatgaaatcctcgtcacctcgcaggaggctgaatgtagcatttggcgaggacaattcatctgaagaagaagaccctgcttacagcgcttggatggcaaaatgtccttctgctttggcttccttcaagcaaattgtagccagtgcacaagggaagaagattgctgtgtttctagactatgacggcacactgtcgcctattgtggatgatcctgacaaagcagtgatgtctcccgtgatgagagctgctgtgagaaatgttgcgaagtacttccccactgcaattgtcagcggaaggtcccgcaataaggtgtttgaatttgtaaaactgaaggagctttattatgctggaagtcatggtatggacataatggcaccttcagcaaatcatgagcacagtgctgaaaagagcaaacaggccaatctcttccaacctgcacacgactttctgccaatgatcgatgaggttaccaagtccctcttgcaagttgtcagtggaattgaaggtgcaactgttgagaacaacaaattctgcgtttctgtacattatcgcaacgttgcagagaaggattggaaactggtcgcacggctcgtaaacgaagtgctggaggcttttcctcgtctcaaagtaaccaatggacgaatggttttagaggttcgtccggtgatcgactgggacaagggaaaggctgtggagtttctgctccagtcactcgggctaaatgactctgaaaatgtgatccccatctacattggagacgacagaactgacgaagacgctttcaaggtacttcgacagcgaaattgcggttatggaatactagtttcacaggttcccaaggaaactgaagccttctactcgctgagagatccatctgaagtgatggagttcctcaatttcttggtgagatggaagaagcactcagtgtgagctcgctaagcagccatcgatcagctgtcagaagttggagctaataataaaagggatgtggagtgggctacatgtatctcggatctctctgcgagccacctaatggtcttgcgtggccctttaatctgtatgtttttgtgtgtaagctactgctagctgtttgcaccttctgcgtccgtggttgtgtttccgtgctacctttttatgttttgatttggatcttgtttgaaaataatcttaccagctttgggtaaactgtttattacgtactctatatagcatatgtgaccgacgacaacggtttcattttagatgatgtgtatggatgatttctttccaaaatcacatctttagtataagagcaattttaccatccaataccaaattttatactagaaaatattttgggatatcaaaatttatggtacctccagtaccaaatgttgaatggtaaactttcataatatacaagtcactctaggatatttaagacaatttttagttttttcttattgttgcccttgttaaatacatgagaaattttacatcacttaaaatgtatcaagaggtatcaaatttttttaatacaaaatttagtactttctccgtttatatatgaatgtggacaatgcttgaaagtcttataacctgaaactgaggtagtgtatcgagaagtacaaaattttacactaaaatcccagtacttactcaataactgtaaaattactctaaatatgtactccctctatttcagattataagtcgttttaactttagtcaaagttaaactgtttcaagtttaaccaagtttgtagataaaagtagtaacatattcaacacaagacaaatatattataaaaacatattgaattatagatttaattaaattaatttggtattgcaagtattactaaatttgtttataaatttggtcgaatttaaaatagtttgactttaaccaaagtcaaaacaaattataatctaaaacaaaggtaatacattgtatcactctcatgaatggattgtaacatacattaatttaattactattttagttcttgtgcaaaagttgaaaacgatttatgtttggaatctttttgtggtgtatatatatgaaaccattcctctaccatccttccccaaccataatcctcacaaccgttagccccattgtgatctcacccagttgctagcctcttttgtcaccttgtcacagctctcctccattcattacacaatggcatcggaccgcgatcgcttaattaagcttgcatgcctgcagtgcagcgtgacccggtcgtgcccctctctagagataatgagcattgcatgtctaagttataaaaaattaccacatattttttttgtcacacttgtttgaagtgcagtttatctatctttatacatatatttaaactttactctacgaataatataatctatagtactacaataatatcagtgttttagagaatcatataaatgaacagttagacatggtctaaaggacaattgagtattttgacaacaggactctacagttttatctttttagtgtgcatgtgttctcctttttttttgcaaatagcttcacctatataatacttcatccattttattagtacatccatttagggtttagggttaatggtttttatagactaatttttttagtacatctattttattctattttagcctctaaattaagaaaactaaaactctattttagtttttttatttaataatttagatataaaatagaataaaataaagtgactaaaaattaaacaaataccctttaagaaattaaaaaaactaaggaaacatttttcttgtttcgagtagataatgccagcctgttaaacgccgtcgacgagtctaacggacaccaaccagcgaaccagcagcgtcgcgtcgggccaagcgaagcagacggcacggcatctctgtcgctgcctctggacccctctcgagagttccgctccaccgttggacttgctccgctgtcggcatccagaaattgcgtggcggagcggcagacgtgagccggcacggcaggcggcctcctcctcctctcacggcaccggcagctacgggggattcctttcccaccgctccttcgctttcccttcctcgcccgccgtaataaatagacaccccctccacaccctctttccccaacctcgtgttgttcggagcgcacacacacacaaccagatctcccccaaatccacccgtcggcacctccgcttcaaggtacgccgctcgtcctccccccccccccctctctaccttctctagatcggcgttccggtccatggttagggcccggtagttctacttctgttcatgtttgtgttagatccgtgtttgtgttagatccgtgctgctagcgttcgtacacggatgcgacctgtacgtcagacacgttctgattgctaacttgccagtgtttctctttggggaatcctgggatggctctagccgttccgcagacgggatcgatttcatgattttttttgtttcgttgcatagggtttggtttgcccttttcctttatttcaatatatgccgtgcacttgtttgtcgggtcatcttttcatgcttttttttgtcttggttgtgatgatgtggtctggttgggcggtcgttctagatcggagtagaattctgtttcaaactacctggtggatttattaattttggatctgtatgtgtgtgccatacatattcatagttacgaattgaagatgatggatggaaatatcgatctaggataggtatacatgttgatgcgggttttactgatgcatatacagagatgctttttgttcgcttggttgtgatgatgtggtgtggttgggcggtcgttcattcgttctagatcggagtagaatactgtttcaaactacctggtgtatttattaattttggaactgtatgtgtgtgtcatacatcttcatagttacgagtttaagatggatggaaatatcgatctaggataggtatacatgttgatgtgggttttactgatgcatatacatgatggcatatgcagcatctattcatatgctctaaccttgagtacctatctattataataaacaagtatgttttataattattttgatcttgatatacttggatgatggcatatgcagcagctatatgtggatttttttagccctgccttcatacgctatttatttgcttggtactgtttcttttgtcgatgctcaccctgttgtttggtgttacttctgcagggatccccgatcatgcaaaaactcattaactcagtgcaaaactatgcctggggcagcaaaacggcgttgactgaactttatggtatggaaaatccgtccagccagccgatggccgagctgtggatgggcgcacatccgaaaagcagttcacgagtgcagaatgccgccggagatatcgtttcactgcgtgatgtgattgagagtgataaatcgactctgctcggagaggccgttgccaaacgctttggcgaactgcctttcctgttcaaagtattatgcgcagcacagccactctccattcaggttcatccaaacaaacacaattctgaaatcggttttgccaaagaaaatgccgcaggtatcccgatggatgccgccgagcgtaactataaagatcctaaccacaagccggagctggtttttgcgctgacgcctttccttgcgatgaacgcgtttcgtgaattttccgagattgtctccctactccagccggtcgcaggtgcacatccggcgattgctcactttttacaacagcctgatgccgaacgtttaagcgaactgttcgccagcctgttgaatatgcagggtgaagaaaaatcccgcgcgctggcgattttaaaatcggccctcgatagccagcagggtgaaccgtggcaaacgattcgtttaatttctgaattttacccggaagacagcggtctgttctccccgctattgctgaatgtggtgaaattgaaccctggcgaagcgatgttcctgttcgctgaaacaccgcacgcttacctgcaaggcgtggcgctggaagtgatggcaaactccgataacgtgctgcgtgcgggtctgacgcctaaatacattgatattccggaactggttgccaatgtgaaattcgaagccaaaccggctaaccagttgttgacccagccggtgaaacaaggtgcagaactggacttcccgattccagtggatgattttgccttctcgctgcatgaccttagtgataaagaaaccaccattagccagcagagtgccgccattttgttctgcgtcgaaggcgatgcaacgttgtggaaaggttctcagcagttacagcttaaaccgggtgaatcagcgtttattgccgccaacgaatcaccggtgactgtcaaaggccacggccgtttagcgcgtgtttacaacaagctgtaagagcttactgaaaaaattaacatctcttgctaagctgggagctcgatccgtcgacctgcagatcgttcaaacatttggcaataaagtttcttaagattgaatcctgttgccggtcttgcgatgattatcatataatttctgttgaattacgttaagcatgtaataattaacatgtaatgcatgacgttatttatgagatgggtttttatgattagagtcccgcaattatacatttaatacgcgatagaaaacaaaatatagcgcgcaaactaggataaattatcgcgcgcggtgtcatctatgttactagatctgctagccctgcaggaaatttaccggtgcccgggcggccagcatggccgtatccgcaatgtgttattaagttgtctaagcgtcaatttgtttacaccacaatatatcctgccaccagccagccaacagctccccgaccggcagctcggcacaaaatcaccactcgatacaggcagcccatcagaattaattctcatgtttgacagcttatcatcgactgcacggtgcaccaatgcttctggcgtcaggcagccatcggaagctgtggtatggctgtgcaggtcgtaaatcactgcataattcgtgtcgctcaaggcgcactcccgttctggataatgttttttgcgccgacatcataacggttctggcaaatattctgaaatgagctgttgacaattaatcatccggctcgtataatgtgtggaattgtgagcggataacaatttcacacaggaaacagaccatgagggaagcgttgatcgccgaagtatcgactcaactatcagaggtagttggcgtcatcgagcgccatctcgaaccgacgttgctggccgtacatttgtacggctccgcagtggatggcggcctgaagccacacagtgatattgatttgctggttacggtgaccgtaaggcttgatgaaacaacgcggcgagctttgatcaacgaccttttggaaacttcggcttcccctggagagagcgagattctccgcgctgtagaagtcaccattgttgtgcacgacgacatcattccgtggcgttatccagctaagcgcgaactgcaatttggagaatggcagcgcaatgacattcttgcaggtatcttcgagccagccacgatcgacattgatctggctatcttgctgacaaaagcaagagaacatagcgttgccttggtaggtccagcggcggaggaactctttgatccggttcctgaacaggatctatttgaggcgctaaatgaaaccttaacgctatggaactcgccgcccgactgggctggcgatgagcgaaatgtagtgcttacgttgtcccgcatttggtacagcgcagtaaccggcaaaatcgcgccgaaggatgtcgctgccgactgggcaatggagcgcctgccggcccagtatcagcccgtcatacttgaagctaggcaggcttatcttggacaagaagatcgcttggcctcgcgcgcagatcagttggaagaatttgttcactacgtgaaaggcgagatcaccaaagtagtcggcaaataaagctctagtggatctccgtacccggggatctggctcgcggcggacgcacgacgccggggcgagaccataggcgatctcctaaatcaatagtagctgtaacctcgaagcgtttcacttgtaacaacgattgagaatttttgtcataaaattgaaatacttggttcgcatttttgtcatccgcggtcagccgcaattctgacgaactgcccatttagctggagatgattgtacatccttcacgtgaaaatttctcaagcgctgtgaacaagggttcagattttagattgaaaggtgagccgttgaaacacgttcttcttgtcgatgacgacgtcgctatgcggcatcttattattgaataccttacgatccacgccttcaaagtgaccgcggtagccgacagcacccagttcacaagagtactctcttccgcgacggtcgatgtcgtggttgttgatctagatttaggtcgtgaagatgggctcgagatcgttcgtaatctggcggcaaagtctgatattccaatcataattatcagtggcgaccgccttgaggagacggataaagttgttgcactcgagctaggagcaagtgattttatcgctaagccgttcagtatcagagagtttctagcacgcattcgggttgccttgcgcgtgcgccccaacgttgtccgctccaaagaccgacggtctttttgttttactgactggacacttaatctcaggcaacgtcgcttgatgtccgaagctggcggtgaggtgaaacttacggcaggtgagttcaatcttctcctcgcgtttttagagaaaccccgcgacgttctatcgcgcgagcaacttctcattgccagtcgagtacgcgacgaggaggtttatgacaggagtatagatgttctcattttgaggctgcgccgcaaacttgaggcagatccgtcaagccctcaactgataaaaacagcaagaggtgccggttatttctttgacgcggacgtgcaggtttcgcacggggggacgatggcagcctgagccaattcccagatccccgaggaatcggcgtgagcggtcgcaaaccatccggcccggtacaaatcggcgcggcgctgggtgatgacctggtggagaagttgaaggccgcgcaggccgcccagcggcaacgcatcgaggcagaagcacgccccggtgaatcgtggcaagcggccgctgatcgaatccgcaaagaatcccggcaaccgccggcagccggtgcgccgtcgattaggaagccgcccaagggcgacgagcaaccagattttttcgttccgatgctctatgacgtgggcacccgcgatagtcgcagcatcatggacgtggccgttttccgtctgtcgaagcgtgaccgacgagctggcgaggtgatccgctacgagcttccagacgggcacgtagaggtttccgcagggccggccggcatggccagtgtgtgggattacgacctggtactgatggcggtttcccatctaaccgaatccatgaaccgataccgggaagggaagggagacaagcccggccgcgtgttccgtccacacgttgcggacgtactcaagttctgccggcgagccgatggcggaaagcagaaagacgacctggtagaaacctgcattcggttaaacaccacgcacgttgccatgcagcgtacgaagaaggccaagaacggccgcctggtgacggtatccgagggtgaagccttgattagccgctacaagatcgtaaagagcgaaaccgggcggccggagtacatcgagatcgagctagctgattggatgtaccgcgagatcacagaaggcaagaacccggacgtgctgacggttcaccccgattactttttgatcgatcccggcatcggccgttttctctaccgcctggcacgccgcgccgcaggcaaggcagaagccagatggttgttcaagacgatctacgaacgcagtggcagcgccggagagttcaagaagttctgtttcaccgtgcgcaagctgatcgggtcaaatgacctgccggagtacgatttgaaggaggaggcggggcaggctggcccgatcctagtcatgcgctaccgcaacctgatcgagggcgaagcatccgccggttcctaatgtacggagcagatgctagggcaaattgccctagcaggggaaaaaggtcgaaaaggtctctttcctgtggatagcacgtacattgggaacccaaagccgtacattgggaaccggaacccgtacattgggaacccaaagccgtacattgggaaccggtcacacatgtaagtgactgatataaaagagaaaaaaggcgatttttccgcctaaaactctttaaaacttattaaaactcttaaaacccgcctggcctgtgcataactgtctggccagcgcacagccgaagagctgcaaaaagcgcctacccttcggtcgctgcgctccctacgccccgccgcttcgcgtcggcctatcgcggccgctggccgctcaaaaatggctggcctacggccaggcaatctaccagggcgcggacaagccgcgccgtcgccactcgaccgccggcgctgaggtctgcctcgtgaagaaggtgttgctgactcataccaggcctgaatcgccccatcatccagccagaaagtgagggagccacggttgatgagagctttgttgtaggtggaccagttggtgattttgaacttttgctttgccacggaacggtctgcgttgtcgggaagatgcgtgatctgatccttcaactcagcaaaagttcgatttattcaacaaagccgccgtcccgtcaagtcagcgtaatgctctgccagtgttacaaccaattaaccaattctgattagaaaaactcatcgagcatcaaatgaaactgcaatttattcatatcaggattatcaataccatatttttgaaaaagccgtttctgtaatgaaggagaaaactcaccgaggcagttccataggatggcaagatcctggtatcggtctgcgattccgactcgtccaacatcaatacaacctattaatttcccctcgtcaaaaataaggttatcaagtgagaaatcaccatgagtgacgactgaatccggtgagaatggcaaaagctctgcattaatgaatcggccaacgcgcggggagaggcggtttgcgtattgggcgctcttccgcttcctcgctcactgactcgctgcgctcggtcgttcggctgcggcgagcggtatcagctcactcaaaggcggtaatacggttatccacagaatcaggggataacgcaggaaagaacatgtgagcaaaaggccagcaaaaggccaggaaccgtaaaaaggccgcgttgctggcgtttttccataggctccgcccccctgacgagcatcacaaaaatcgacgctcaagtcagaggtggcgaaacccgacaggactataaagataccaggcgtttccccctggaagctccctcgtgcgctctcctgttccgaccctgccgcttaccggatacctgtccgcctttctcccttcgggaagcgtggcgctttctcatagctcacgctgtaggtatctcagttcggtgtaggtcgttcgctccaagctgggctgtgtgcacgaaccccccgttcagcccgaccgctgcgccttatccggtaactatcgtcttgagtccaacccggtaagacacgacttatcgccactggcagcagccactggtaacaggattagcagagcgaggtatgtaggcggtgctacagagttcttgaagtggtggcctaactacggctacactagaagaacagtatttggtatctgcgctctgctgaagccagttaccttcggaaaaagagttggtagctcttgatccggcaaacaaaccaccgctggtagcggtggtttttttgtttgcaagcagcagattacgcgcagaaaaaaaggatctcaagaagatcctttgatcttttctacggggtctgacgctcagtggaacgaaaactcacgttaagggattttggtcatgagattatcaaaaaggatcttcacctagatccttttgatccggaattaattcctgtggttggcatgcacatacaaatggacgaacggataaaccttttcacgcccttttaaatatccgattattctaataaacgctcttttctcttaggtttacccgccaatatatcctgtcaaacactgatagtttaaactgaaggcgggaaacgacaatctgatcatgagcggagaattaagggagtcacgttatgacccccgccgatgacgcgggacaagccgttttacgtttggaactgacagaaccgcaacgctgcaggaattggccgcagcggccatttaaatcaattgggcgcgccgaattcgagctcggtac

SEQ ID NO: 534 - DNA, 26 bp, Artificial Sequence
  T6PP-RTPCRF
  misc_feature (1)..(26): T6PP-RTPCRF
gacagaactgacgaagacgctttcaa

SEQ ID NO: 535 - DNA, 19 bp, Artificial Sequence
  6906-tr
  misc_feature (1)..(19): 6906-tr
ctccaacttctgacagctg

SEQ ID NO: 536 - DNA, 8709 bp, Artificial sequence
  OsMADS5-GUS-expression cassette
  misc_feature (1)..(8709): OsMADS5-GUS expression cassette
ggcgcgcctgagcaggtagccggcgaccaatcgcgagcgtcgccaacacgctgccttttctcaatgcatggcgtgggccccaccaggggccatttttttctctttaaaaaggagaaaagcaatcagagttgagacctccgagcgcgagacccaacatctatccctgggcccgcccaaaatccatttccaggtagttgtagccaaagaatcaaggatactccgatcgtttgagtggaaataataactcctacatgtaaaattaattaaggcctctatttgtatgaaaaaacataaaaaaaggatttttaatcttattgaaaaaaaatcctaaggataacttcgaataaatgattaaatcttaacattttctttgaaattcatatggaacaaacaatgctatagagactttggaggaattaaagttattaagagctctaaccttttaaaagattaccaatgagtctatataggtagttgtagccaaagaatcaaggatactccgatcgtttgagtggaaataataactcctacatgtaaaattaattaaggcctctatttgtatgaaaaaacataaaaaaaggatttttaatcttattgaaaaaaaatcctaaggataacttcgaataaatgattaaatcttaacattttctttgaaattcatatggaacaaacaatgctatagagactttggaggaattaaagttattaagagctctaaccttttaaaagattaccaatgagtctatataggtagttgtagccaaagaatcaaggatactccgatcgtttgagtggaaataataactcctacatgtaaaattaattaaggcctctatttgtatgaaaaaacataaaaaaaggatttttaatcttattgaaaaaaaatcctaaggataacttcgaataaatgattagatcttaacattttctttgaaattcatatggaacaaacaatgctatagagactttggaggaattaaagttattaagagctctaaccttttaaaagattaccaatgagtctatataggtagttgtagccaaagaatcaaggatactccgatcgtttgagtggaaataataactcctacatgtaaaattaattaaggcctctatttgtatgaaaaaacataaaaaaaggatttttaatcttattgaaaaaaaatcctaaggataacttcgaataaatgattaaatcttaacattttctttgaaattcatatggaacaaacaatgctatagagactttggaggaattaaagttattaagagctctaaccttttaaaagattaccaatgagtctatataggtagttgtagccaaagaatcaaggatactccgatcgtttgagtggaaataataactcctacatgtaaaattaattaaggcctctatttgtatgaaaaaacataaaaaaaggatttttaatcttattgaaaaaaaaatcctaaagataacttcgaataaatgattaaatcttaacattttctttgaaattcatatggaacaaacaatgctatagagactttggaggaattaaagttattaagagctctaaccttttaaaagattaccaatgagtctatatcactcattcaattcctacgtttttcaaatggcctacatactcaaatggttgttcttgttttttttttctctctttcgcaattacaatggacctgctcgcaacttttgcaatctgtctatgttttttatgtttagcagctgcgctgctgcagctgaacaaaaaaaaacactgtgacgattggctgcaacacaatgaaaatgagtgcagccgaacagagccaatatcttcaaaatcttgtttttttcatcttccatttttcaatcatttattttaaaggagcccttaattaatggttaagaaattttatatcttgcattttaaaggataatgctgataatcaaatagactacggtgaaaaaaactttaaaactaaatgtaagattaaatttcacacttaaattttactagctacggctgataattaagctaacaacttactgtgactgacttggtcatagggggagagagagagagagagagagagagagagagagagagagagagagagagagagagagagagagagagagagagagagagagagagagagaaaagaaggcaaggagcactccggccagcacagccgatggtacgagagcatggctagctagccgagctacttagctactacatccatgatccatccatccccaacaaacggagcaagactgcaagggagagggagagagagggaagcttgcaggctgcagctaactagctaggcaaggagagagaggagatagatcaagaagagattttgagaccgagagagagctagagagagctcgacggggcgagggaaagtagagctgaagcggatcgagaacaagataagccggcaggtgacgttcgcgaagaggaggaacgggctgctgaagaaggcgtacgagctgtccgtgctctgcgacgccgaggtcgccctcatcatcttctccacccgcggccgcctcttcgagttctccacctcctcctggtactactaataattctctcttgcaagctctcgccccttgcagagaattcatatatatctcgccctaattctaatgcaaagttagttaattagtttgcagccaagaaagactagttttctcgttatgagtttttgaagctccttgtgatttctgggctagctactgcccacctagctaccatgttctaattaatcatcagtccgtgtgtttaattaacatctcatgtttgtccgggaagttcttacacccagtcttttccctgctgctttgtttgtgtttaaaacatatatataccagcatttcgtttgtatttgttggaatttttaccaatctttctcaaagatcctgattttagttaatttttaccacctcgatcgtgatcatatacatgctcatagctgattaactaacctgttcctgttgttgttttggttaaagaaagagagacaggacagccgttctagtcacctgatggctgccgatctgtgtgtgtttgccgtcccctaattcctctttacggtttgcagttgccatagagactagtactctgtcaacagaatcaagcatgcaatctctccatgcttgcttccatttgtaggctagagctgcatgctagatatctctaagctgatctcttccatgcttgtctctctagctctttcattagtgcatgcaattttcagagtgaagtagatgagacccctccagatctgcacaagaacatggcatatagtactactagtacgcatattgcatcttaattctcatattgcacaagcacatatactaggctgcagtgccttttccaatggcaagttatttttgtcagatcttaattaggagcatcttttccaatggcaagttgggagggtttcttgctctggttttactgttccattgggaactcgcaacataggggttgttcttgggttccactgttccattgagtctctctctctttctctctagctaggtttctctctctacgtcttgtcaaatgtctcggctgtactagtgtgcatgcgattgcagctgcagaagcaagaggaaaagtagtaatgcagcagcaggaggaaaagtcgtaggagtactcgtggagataagcatctctgtatcgatcgtctcgtcggttgttatcctccctgtggatatgtacacggtccgtgtttagatccaaaataattcatcaaacttttaactttttcatcacatcaaaacttttctacacacataaacttttaacttttacgtcacatcgtttcaatttcaaccaaacttctaagggcccctttgaattggaggaaaaacataggaattttagaggatttcaatcctatagaaaaatttcctatgaagccctttgaaacaaatgattgaatcctatccaatcctttgaaattcctatggaatggacaatcctatagagattttggaggaaatttagcaagagcttcaacctcttgctaactttcctttgagtctatctctctcatctaattcctgcgtttttcctgcggttcaatcaaacggtcattcatgtgtttttcctgcgttttgcaatcctctgttttacacttacattcctaccaaaatcctacgtttttcctattcctacgttttttcaatcctgcgattcaaagggaccctaattttggtgtgaactaaacacagcctagttgtagttgtgtggtacgaaagatcgaattgatttctagctaggcgtggccggacacacacccaagttaattcactgcattcgtaatttcatactcctatgcgattcataatttcacatgcgatgatgcgaatagattgatttgatcatttgaacattgtcatatggtatgcaaacaacttatcgtgcgagaggcgtgcgtgtcgattgccaaaattttctgtcagcgcacagtacaggctagctagtctggaacgaggttgtgtcgatttacaaggcacagttactagctaccctaccgttagggtatgtagtaggagtacttgtgtaccaaaagtttggattggttgaattttccaagctcctagtcacaatgtactccctccttttccctccccaaaaaatatactccttctatccagtatccacaaagaaaataatgtaactctagcatttaaaagacaaattagcaagaagtaaaatgattgggagtgaaattgtggttgggggtaaaatagggatcataatttgaatgaggggggtggttgtagggaaaaatagtactgcactcctttagaattgcacttattttgaaacaaaatctgaatgttagttacaattgtttttttctaaaaaaacagagtacaattttctaataatttaacacaaatcaatcaaatatatacatgtttgtaagtgatagtgtttatagctccaaacagggtttgaaatttcggctcgaaatttcgcccccaccgaaatgttcatatctcgcccgaaactttcggttgtttgcaaatttttgtgaatttggtcaaattttattcaaatccattcaaaatcagtcaaaaattcaaaaaaaatcgtacgaaaaaaaaatctgaaattttggttatatcgcccacctgcggtagaaatccttctttcgaaatttaaaaccctggctccaaacttagggtgcgctgtgcacataccctagaaaatataactgatatatgctccattaattatgaaaggcaaaataaactgatcatgcatatgtaggaaaatcgggttgtatatacatgtatttaaacaacaaaatataatataacaactttaactgatactgcattgaaaatagttttgtggtccactgattttcttttttgtaacagtatccaccatggtacgtcctgtagaaaccccaacccgtgaaatcaaaaaactcgacggcctgtgggcattcagtctggatcgcgaaaactgtggaattgatcagcgttggtgggaaagcgcgttacaagaaagccgggcaattgctgtgccaggcagttttaacgatcagttcgccgatgcagatattcgtaattatgcgggcaacgtctggtatcagcgcgaagtctttataccgaaaggttgggcaggccagcgtatcgtgctgcgtttcgatgcggtcactcattacggcaaagtgtgggtcaataatcaggaagtgatggagcatcagggcggctatacgccatttgaagccgatgtcacgccgtatgttattgccgggaaaagtgtacgtatcaccgtttgtgtgaacaacgaactgaactggcagactatcccgccgggaatggtgattaccgacgaaaacggcaagaaaaagcagtcttacttccatgatttctttaactatgccggaatccatcgcagcgtaatgctctacaccacgccgaacacctgggtggacgatatcaccgtggtgacgcatgtcgcgcaagactgtaaccacgcgtctgttgactggcaggtaccaagctgcgaatcttcgtttttttaaggaattctcgatctttatggtgtataggctctgggttttctgttttttgtatctcttaggattttgtaaattccagatctttctatggccacttagtagtatatttcaaaaattctccaatcgagttcttcattcgcattttcagtcattttctcttcgacgttgtttttaagcctgggtattactcctatttagttgaactctgcagcaatcttagaaaattagggttttgaggtttcgatttctctaggtaaccgatctattgcattcatctgaatttctgcatatatgtcttagatttctgataagcttacgatacgttaggtgtaattgaagtttatttttcaagagtgttattttttgtttctgaatttttcaggtggtggccaatggtgatgtcagcgttgaactgcgtgatgcggatcaacaggtggttgcaactggacaaggcactagcgggactttgcaagtggtgaatccgcacctctggcaaccgggtgaaggttatctctatcaactgtgcgtcacagccaaaagccagacagagtgtgatatctacccgcttcgcgtcggcatccggtcagtggcagtgaagggcgaacagttcctgattaaccacaaaccgttctactttactggctttggtcgtcatgaagatgcggacttgcgtggcaaaggattcgataacgtgctgatggtgcacgaccacgcattaatggactggattggggccaactcctaccgtacctcgcattacccttacgctgaagagatgctcgactgggcagatgaacatggcatcgtggtgattgatgaaactgctgctgtcggctttaacctctctttaggcattggtttcgaagcgggcaacaagccgaaagaactgtacagcgaagaggcagtcaacggggaaactcagcaagcgcacttacaggcgattaaagagctgatagcgcgtgacaaaaaccacccaagcgtggtgatgtggagtattgccaacgaaccggatacccgtccgcaaggtgcacgggaatatttcgcgccactggcggaagcaacgcgtaaactcgacccgacgcgtccgatcacctgcgtcaatgtaatgttctgcgacgctcacaccgataccatcagcgatctctttgatgtgctgtgcctgaaccgttattacggatggtatgtccaaagcggcgatttggaaacggcagagaaggtactggaaaaagaacttctggcctggcaggagaaactgcatcagccgattatcatcaccgaatacggcgtggatacgttagccgggctgcactcaatgtacaccgacatgtggagtgaagagtatcagtgtgcatggctggatatgtatcaccgcgtctttgatcgcgtcagcgccgtcgtcggtgaacaggtatggaatttcgccgattttgcgacctcgcaaggcatattgcgcgttggcggtaacaagaaagggatcttcactcgcgaccgcaaaccgaagtcggcggcttttctgctgcaaaaacgctggactggcatgaacttcggtgaaaaaccgcagcagggaggcaaacaatgagagctccgcgggcggccgcactagtcccgggccatggggggtctagaatgaattgcttatcacattaatggacatctcctatgttggatgtggtgtttgacgtaatgctctcttttacatgcgggttttaccttaagtgtgtgtgctaaatttagtgcgtttgtttatgctcttttgaactgaacaaaggaatgatcccggtttgattgatgaatgctgcaagaacataatctatatgttagtctgaattcagtatgtaatgaagatgttttgttactaattaataaatacgaagtaaacaattaactgaccactaatcatgtcagcttagatatatgcttataattatgttgcctaattcttaccttaattggtctgtgttcaatatatgtgagtataccacactagttgtttctcagcatgaactaattaagtgtgagtagataaaacgagtaaattggaatgtaagaaaaggtaaaaataaagtacttattaaagagagagtgcatgccaaaagtacgaagagaaaaacttagaatattagttacaatataatatataatcaagtgcttcgttcgaacccatacatgtttgtttttcttatttttctaatatttcttcaccatataggttccccaggttgcactccgaaaggtcgtgtaatgtgtatttagtagcacacatagttacatcactgcttattttctcatccactagccacaagattgtgtgcgtgtgaccatctcaattagatccatctcctccttcacatgcacggtattgatttgtgctagacctgccggtgtctccaatggtgatgatccagctgattcatcgtcttggaggacatcatcgtcccatgccatttccatatctatctcatggccaatcttgttagcataatcaatgtggttgaagatgtagttcatgtcaacatcatcatctatgttgtaaacctggtacggcatctcgtccttcgtttcgaacaaatgatcacacatatcaaggcataaatcatcataggtagagaccaggagttcttcacaagagttggtctggatgtagctgttctcatccggcgcgcc

SEQ ID NO: 537 - DNA, 7954 bp, Artificial sequence
  OsMADS6-GUS expression cassette
  misc_feature (1)..(7954): OsMADS6-GUS expression cassette
cggaccgctaggacgatggtgtgatgtgggaacacgaagaaaacatgaggaaaaaatattaaaatgaatttcccacttaaaatgcatcaaataaaaaaaataaagaaacgaccgggaatagacacagggtttgtgaactagctagggcaaacatcatatggtcccttgctgatgcacaagtacattgagatgtcatttcaattctgtgcatcatatgcatgtggtcccttgctgaatattactcttgaaatatctaccagtgccaatctattgcatgacttaattaattcacaggttttgttgattacattattagtaagcttgagagcacaagctcaatggatttttctataaatggggatcattttgcaattttctttgtcgtgcaaagttagccttctttattactacttctgtttttaaatatacgatcctattgacttttggtcatatatttaaccatgtatcttatttagatagtttgcgcaaatatatataccttcaatgataaaattagttacaatgaaacaaatgatatttacgcaattctttttactaaacaagtcacaagaagtacctgcagcaatatatgttggaaccgtgcagtagatcgagcctagctacgcaaaaaaacaaaaagagaaaaaaagggaaaggaaaaacattaatcatgcatgagcagtatgcccggcaactggaatttgtcaaagatatggggagaggagaataatacaagtactactactacctagctctaccatgcatatgcacccaaaggcaaactggattattggataaagcacagatgctggcaaaacaatccttaagcctcccctccctgcttctttatttttgggcagcctctaccggacggtgccgtggtccattggaccagtaggtggcgacatacatggtttgggttaagtctaggagagcagtgtgtgtgcgcgcgcaagagagagagactgtgagtctgggagtagccctctcccctcctttggccatcttcctcgtgtatatgcatatatgcatcatcgcaacggtgtatatttgtggtgtggcgggtgtggcattggattgcccccattttggctcgtgcttcccagttagggtaaaacctgtggtaaacttgctagccccacgccaaagttacccttctttattgttgaaagggagaggaggtgtgtgaattgtgatggagggagagagagagagagatagaaagagagatgtgtgtcaaagcaagcaagaaaccagtttcacaaagagctactactagtactagtgtactactgtggtacagtgcccaatgtcctttctccggactcgactccactaatattctcctcttctcgcgcggctcgttatattctcgtcatcattggaggctttagcaagcaagaagagaggcagtggtggtggtggtggaggaggagctagctagcctgtgcttgctgatcggtgctgagctgaggaatcgttcgatcgatcgggcgagtcgacgaggggaagagttgagctgaggcgcatcgagaacaagatcaacaggcaggtcaccttctccaagcgccgcaacggcctcctcaagaaggcctacgagctgtccgttctctgcgacgccgaggtcgcgctcatcatcttctccagccgcggcaagctctacgagttcggcagcgccgggtataattaatacagacacaacaacacacacaaccaacaaaccagcatcaatttgaacctgcagatctgctgttttctctgatcaattgcttctttttttttgttcttttttgtttcttttatctgctgcaacggcgtcctgctcctctggggtttctcgttttctttttcatttatttttagcaggtgccaagtagccgagctactatacttacctggccatgttaattattttattccgtctgtctgtgtgtgtctgtgcatactactatagggacatggcgcggtgttcttataaaccgggaggccggatccctaactagcatgggaggatatcttttcagcggatctatacaaaccctactcctgctgacctctttcttccagtttctccgggtcttccttggattattattgcccatcttccgggttgtgcgtgtgtcagagacagctcgaacgataaatttctcaaaaccagtactagagagggtgtgttgtgtgtgagaactgagtggagagttagcatgaaggctgcaaactagaaaggaaggtatgttctttcctttttgatccatcaggggagccccttctggtattaagatctttccggcacattgattttcatactttgtgatgaccctggaagaatcggcgtagcagcgtagcaccgctccattttggtcttaccctcacctccccatgctatgaactgatcaatttcattgttcttcatcacccttctcctagctttccacttccttcggatctcatgccatgtttctcagcatgaatcaaatttaattcgtgttttctacttccatatatactggaagaaatttaattagatctatttttgctcgggaggtcttcatactttgagttctgatgccatcaccttatttcccccccccccttctcttgttctatcttcttcctcatcttggcttgatcattttgatctgtcagttatagcatgatgcattctcaatttgactgtatgtaagttcaaccggaaatatgttgaatggattttctatatatcaacacttgatgtcaggcctgcatctgtttcgcttgtggtggtgtggccaaaattgtctatatttgatctttgctcttctttctcctcatttcatgacgattcctactacggcttaaaccattctttattctttactaatcatggatgttgcttgactcctagttgtttcgtactagctcaacttggagatcttttcattatttgcctagttggtgggtacgtttgtgacagatctaaaatggtgcacgaaaagttttacttattatgaaaaaagggagcttaacagggtaatttctctatttattcgtgatgacattttttccttgataagggggattttttataatctgcactcacatgtttatatgtaaaatctagctcttttgttttgtttttggcatatttcccgctaagtatagagtttatgtggataacattataacttttcaagatccaatccacatctttgattgtgaaaatcatacaatagggaaaatcaactgaagggttaattagatgctatatgcatatatatatatatgtgcgcgcgcgcgcgcctgaatttaactatgtatgcatccaactgtttcattgaaaaagatttgatatttttcagtctattctttttcgagtatatatttaatatgtttcaatctgttttgaccattataagataaagcctatattcaccaggcatttgagatgatcttttcatgcatgaaaaagctgttgttatcacttcaactaaccagacgatctaacatgtatttgtataagaaacagaccttgatttccttctgtaaaatcatgcatgtgttcgttttgaattggagtcggcgcgcctgtgttttgaccgtcaggaaagtcttttttttccctgaatagtcaagggtctatacttcttgaagcaattgggacactaatcaattattgtttatacctcggaccatcttttccttcttcacaccactaatcagtttatgccttggaccattaattgtgttgttcacaagcttcttgtttatggtttacaaagcattcgcctagatttgtgtgtgtctctacacatcgatcacttttaaatacttgtcgctttcagttattcttttaacgtttggttatttatcttatttaaaaaaattatcgtattattatttattttgtttgtgatttactttattatcaaaagtatttcaaatatgacttatctttttttataagtgcactaatttttcaaataagatgaatggtcaaatgttacaagaaaaagttaaagcaaccactaatttagggcggaggtagtaaaacctagttattgtaaccaataattttatcaatctataaatgcaacacaaagtcacttcgtgatatctcacacaaagccacttcaacgatgaaagctgactgcatgttttatcaaaacacatgtgatcagtttgttggatgaaaaaaattatctatgtcataaatcaagagttataatataagcttctggctctacaagtaacatttctatgttttttttttacgttcttacatactatgttttgccaaaaaaaacatgatcattttgttggacgaaaagaaatagtaaatatagagtgacctttgatatcattataatataagcttctgcctctataaataacatctatgcactttttacgtcgtagtaatttgatatatgagaaatttacatataacatttttgtgcagcataaccaccatggtacgtcctgtagaaaccccaacccgtgaaatcaaaaaactcgacggcctgtgggcattcagtctggatcgcgaaaactgtggaattgatcagcgttggtgggaaagcgcgttacaagaaagccgggcaattgctgtgccaggcagttttaacgatcagttcgccgatgcagatattcgtaattatgcgggcaacgtctggtatcagcgcgaagtctttataccgaaaggttgggcaggccagcgtatcgtgctgcgtttcgatgcggtcactcattacggcaaagtgtgggtcaataatcaggaagtgatggagcatcagggcggctatacgccatttgaagccgatgtcacgccgtatgttattgccgggaaaagtgtacgtatcaccgtttgtgtgaacaacgaactgaactggcagactatcccgccgggaatggtgattaccgacgaaaacggcaagaaaaagcagtcttacttccatgatttctttaactatgccggaatccatcgcagcgtaatgctctacaccacgccgaacacctgggtggacgatatcaccgtggtgacgcatgtcgcgcaagactgtaaccacgcgtctgttgactggcaggtaccaagctgcgaatcttcgtttttttaaggaattctcgatctttatggtgtataggctctgggttttctgttttttgtatctcttaggattttgtaaattccagatctttctatggccacttagtagtatatttcaaaaattctccaatcgagttcttcattcgcattttcagtcattttctcttcgacgttgtttttaagcctgggtattactcctatttagttgaactctgcagcaatcttagaaaattagggttttgaggtttcgatttctctaggtaaccgatctattgcattcatctgaatttctgcatatatgtcttagatttctgataagcttacgatacgttaggtgtaattgaagtttatttttcaagagtgttattttttgtttctgaatttttcaggtggtggccaatggtgatgtcagcgttgaactgcgtgatgcggatcaacaggtggttgcaactggacaaggcactagcgggactttgcaagtggtgaatccgcacctctggcaaccgggtgaaggttatctctatcaactgtgcgtcacagccaaaagccagacagagtgtgatatctacccgcttcgcgtcggcatccggtcagtggcagtgaagggcgaacagttcctgattaaccacaaaccgttctactttactggctttggtcgtcatgaagatgcggacttgcgtggcaaaggattcgataacgtgctgatggtgcacgaccacgcattaatggactggattggggccaactcctaccgtacctcgcattacccttacgctgaagagatgctcgactgggcagatgaacatggcatcgtggtgattgatgaaactgctgctgtcggctttaacctctctttaggcattggtttcgaagcgggcaacaagccgaaagaactgtacagcgaagaggcagtcaacggggaaactcagcaagcgcacttacaggcgattaaagagctgatagcgcgtgacaaaaaccacccaagcgtggtgatgtggagtattgccaacgaaccggatacccgtccgcaaggtgcacgggaatatttcgcgccactggcggaagcaacgcgtaaactcgacccgacgcgtccgatcacctgcgtcaatgtaatgttctgcgacgctcacaccgataccatcagcgatctctttgatgtgctgtgcctgaaccgttattacggatggtatgtccaaagcggcgatttggaaacggcagagaaggtactggaaaaagaacttctggcctggcaggagaaactgcatcagccgattatcatcaccgaatacggcgtggatacgttagccgggctgcactcaatgtacaccgacatgtggagtgaagagtatcagtgtgcatggctggatatgtatcaccgcgtctttgatcgcgtcagcgccgtcgtcggtgaacaggtatggaatttcgccgattttgcgacctcgcaaggcatattgcgcgttggcggtaacaagaaagggatcttcactcgcgaccgcaaaccgaagtcggcggcttttctgctgcaaaaacgctggactggcatgaacttcggtgaaaaaccgcagcagggaggcaaacaatgagagctccgcgggcggccgcactagtcccacgtgagctcgctaagcagccatcgatcagctgtcagaagttggagctaataataaaagggatgtggagtgggctacatgtatctcggatctctctgcgagccacctaatggtcttgcgtggccctttaatctgtatgtttttgtgtgtaagctactgctagctgtttgcaccttctgcgtccgtggttgtgtttccgtgctacctttttatgttttgatttggatcttgtttgaaaataatcttaccagctttgggtaaactgtttattacgtactctatatagcatatgtgaccgacgacaacggtttcattttagatgatgtgtatggatgatttctttccaaaatcacatctttagtataagagcaattttaccatccaataccaaattttatactagaaaatattttgggatatcaaaatttatggtacctccagtaccaaatgttgaatggtaaactttcataatatacaagtcactctaggatatttaagacaatttttagttttttcttattgttgcccttgttaaatacatgagaaattttacatcacttaaaatgtatcaagaggtatcaaatttttttaatacaaaatttagtactttctccgtttatatatgaatgtggacaatgcttgaaagtcttataacctgaaactgaggtagtgtatcgagaagtacaaaattttacactaaaatcccagtacttactcaataactgtaaaattactctaaatatgtactccctctatttcagattataagtcgttttaactttagtcaaagttaaactgtttcaagtttaaccaagtttgtagataaaagtagtaacatattcaacacaagacaaatatattataaaaacatattgaattatagatttaattaaattaatttggtattgcaagtattactaaatttgtttataaatttggtcgaatttaaaatagtttgactttaaccaaagtcaaaacaaattataatctaaaacaaaggtaatacattgtatcactctcatgaatggattgtaacatacattaatttaattactattttagttcttgtgcaaaagttgaaaacgatttatgtttggaatctttttgtggtgtatatatatgaaaccattcctctaccatccttccccaaccataatcctcacaaccgttagccccattgtgatctcacccagttgctagcctcttttgtcaccttgtcacagctctcctccattcattacacaatggcatcggaccg

SEQ ID NO: 538 - DNA, 9487 bp, Artificial sequence
  OsMADS8-GUS expression cassette
  misc_feature (1)..(9487): OsMADS8-GUS expression cassette
cggaccgttttttgcgaaatgccaaatcctggcatgcctaagctgacctgagcttgtagttttcaaacgaaccgtgttaattgtggtatataacacattgggttggctactgtatcgtacataattttgttggggttatttctgcatgcgtatacgtacggattagttgtaattaagaggaaaaacatgcatgtataatatagatatacctagcatgcaccattatatacttattaatctaagctttaaagtgcaaatgatactacatattgaacattcaactttattgtattgataaattgaaccggatatatccacaagcacaaaatttgcaatgcacttcaaaattaatgtaatctttgcacgctactccctacatttcatattataagttgatttgactttttttttcaagtttataaaaaaaattagcaacatctaaaatatcaaattagtttcacttaatctaacattgaatatatttagatactacgtttgttttatcttaaaaatgttagtatgttttttttataaacttggtcagcctttgaaatgttggactagaaaaaaaggtaaaaaaaattataatgctgaataagccacaatttaaaaagtttacagggacggtttaattcattgacatttcacatatacatagcacatgtcaaattcatatgttaacttttctttttataaactggacaccccgtgccaacagtcaacccctaattaaattaaccacaacatgaatacatcattaattttataacatatactagttattttgcttttcatatatctccccctcttgctaatttgagttcccagcatgcatggatactaattaacttaaccaaaattagttagcctgcagcctaatttgtccatctctagctagctagtttgcacttaacatctgtgatacgttaccacaccaaagttacatacacattaatgattaatcctttgatcagttcctatatatcccaggtagaatatatatcgatctcttcagaatcacgaccaattaggtaaaatgaaagaacatacactcctgcctagccaagacttcaaaccttacacacacatatatatctactactgcaagcactgcaacggcaaagttctctgcaggcaaagagatataccgatcgaagaagcctctctctatccaaacccaaacagctccattttgtctacacgaactatggcaacttggcaaccacatcgctagctagctagatatatactatgctaccttggttcattttgctgctttgatttgcaactgcaacccaagagaaaagttgtaagggtctgtatggggattttctgaccgctgtatcttctctcaaaatcatattaatcctctctacatagtctagtttttcatccaaattctcaaaagctctaattatagaatctaaaaaattaactagaaaacagaagctgagaaatccacattctccatattctcagaagcttgatactaactagctatttcccaaaatcttaggccttatttagttggggaaaatttttgggtttgtttgtcacattggatatacggacacacattagtattaaatgtggtacaataacaaaacaaattacagattccgtcaaaaaactgcaagacaaatttattgagctcaattaatccgtcattagcaaatgtttactgcagcaccacattgtcaaatcaggcgcaattagacttaaaagattcgtctcgtaatttacacgcaaattgtgtaactggttttttttccacatttaatactccatgcatgtatttaaatattcgatgtgatgggtgaaaattgtttattttggaaactaaacaaagccttaagctctcccaacagatcacccaccggctcctagtggacacaagaagggtatttttcccgaaacccgaaaactccgaggtttcaagtgcaaaagcgcccaactctactcacttttccccagcttttccgcgcttaatttctcgacctgtcgaatcctcagtcgccaccgctgcgtcgacgaggagagagagagagagagagagagagagagaaaatccaaagcaatcagtgagagacgcattgaattgggtcggagattagtgcgaaattaacctagatagctttgcctttgcgtacgatggatcgatcgaggccgcctagggttccgcgtcgttccaccaccttgccggaaatggcaatgccgggtagcccccaccgccgctgcccaccctctcccccttccctttttaaacccctcatccccttccccctcctcctcctcctcctcgccttagctttcccctctctttcgcttcgcgagattggttgattcatctcgcgattgatcgagctcgagcggcggtgaggtgaggtggaggaggaggaggaggagatcgggtcgacgagagggagggtggagctgaagaggatcgagaacaagatcaacaggcaggtgacgttcgcgaagcggaggaatgggctgctcaagaaggcgtacgagctctccgtgctctgcgacgccgaggtcgccctcatcatcttctccaaccgcggcaagctctacgagttctgcagcggccaaaggtatatatacatggacgcactgggcgcgcgcctcgatctgctatagctagatcggtagctgcttgcaacgtagctagctagggtttcttgcgcgcgcctgcgcctccagatctggagcgcacgatggttttgtgaacttcttggtggcgattttgcggggatctggggctgcacatggtggatctgcgagtgtgctcgtgttttggtgagttttgggagggtttgggagaaggaagttggtggaattctgtgggaataattagggtttttgttcgttcgatcgggtgctagctagcgtaatagggagtggtgaaatacgtagatctgagggtttctgatcccgtggtagtagtggttttgagatggcgcgcttaatggttttgagtttggtttaattgcgattaatttatgtgcatgcatgggatgggacattcaggatttaagcctggatcagcaagtcgatttttacggagaaaattaatcgttggaagcttcgaatcttaattttatcgatctcctaatggagggtatgcgagtttcgaattcccttgggatctgtttttttcctcaatttttagttttttgaggggcaattttttttagggtatatatgattttttttttttgggggggggggggtgtgtgaagggatcatgcatatcattagccatgtaccggatgtgtgtctaaacaaacgttcactgcatgaattccacggtttggaggcagcataccttacaagatttgggggtttcacttaagattttgtctctttgtttttttaagggatggccgcgggggagtattgtttttcaagtgagttatggttgcatcattaaaggcaacatcaataaatataaagtctgtttctcctgagataagtatatgaaaaatcatatactactatatatataattgtctttcagaaacacagagcgtctgattggctaggcataattcacaagccgcatataagctagttgaattgattttgaattagaaaacattttttttcggggggaagaaaacatttggtattgtgtttagagataaacaattagttagggtagataagtcaggcattcatgagcttcatttcatatttgaatcatacattttccaaactttagaaggttaaattttcttgctcattgtattgcactgatcattttaataatatcttctatagtgaatattacatcattatatattttagataatgattacattattatatgctccgttgcagaaaaaaccaacttttttgccaaacctggacatatataggctatgtccagatttatagctagaagttagggcctcatcttttaccctatgaattataagccaatatcaaattttgaatttcgaaacttgatttagaagttgatttttaatgttttgtcaatgtagattgtttttcagcattaacttttaattcgctaaagacacatatacaattttactcacaaattatattttggttgctaataagccgttatggcttataatcagccgtaagtatatggggactttagcattctttttctttttttatggagggagtacatgcttgccaatttttatagttatgtttaaatggtttccattatacctaagttactaaattaaaattaatacgcctataaaattctaacattaaatatattcacaaataagagtacatgatttcattgaccagggaattcaatttggatatggggtgagtgaaacatccctcctctgctcctcggaagaaatcctgcaagggagtacacaatattcctaggactcacttgagtatctgcagggtacagttagtgacagctttcgattgtcattcgattggtctcctcagctctcgtagctgagctgtcagtacagaagattggtcttcatcagatgtctcttctagttctagctagagctagttcagtggagtattttatgccgacaaattgatactcaacgtgtactgtagatccttttcagaaatctgaattcacgacttgtttaaacaaaggctgtgtttggatccaaacttcagtccttttccattacatcaacctgtcatatacacacaacattttagtcatatcatctccaatttcaaccaaaatctaaactttgcgttgaactaaacacagccaaaaggtcactaaattgacgcggtagaggggggggggtgagcattatagctgtagtagtagtctgcgtgaagttatgccatttcattgtgtgtcgtctgaacttgatatctctctttaaagagtgtactccattttctttacaaaaagtggcctctaggttgatatcatggacatatataaaattataaatcaacttgaaactaccgatgcaagaattaagataaaacgttattgtttcttagaaattgtctccaattatgcaagcaccttcatccgtgtcatggagctaatgttcatgttttgtgggaaacaagatttttcatctactaattaatcgatgtggtccccggaaaagaatgtgccctagattgttagtatttagttatgggcgaactatatatgttcctttatttcgtttttccataaacatagccatttgtgtttttgaaacttgcagcttgaccaccatggtacgtcctgtagaaaccccaacccgtgaaatcaaaaaactcgacggcctgtgggcattcagtctggatcgcgaaaactgtggaattgatcagcgttggtgggaaagcgcgttacaagaaagccgggcaattgctgtgccaggcagttttaacgatcagttcgccgatgcagatattcgtaattatgcgggcaacgtctggtatcagcgcgaagtctttataccgaaaggttgggcaggccagcgtatcgtgctgcgtttcgatgcggtcactcattacggcaaagtgtgggtcaataatcaggaagtgatggagcatcagggcggctatacgccatttgaagccgatgtcacgccgtatgttattgccgggaaaagtgtacgtatcaccgtttgtgtgaacaacgaactgaactggcagactatcccgccgggaatggtgattaccgacgaaaacggcaagaaaaagcagtcttacttccatgatttctttaactatgccggaatccatcgcagcgtaatgctctacaccacgccgaacacctgggtggacgatatcaccgtggtgacgcatgtcgcgcaagactgtaaccacgcgtctgttgactggcaggtaccaagctgcgaatcttcgtttttttaaggaattctcgatctttatggtgtataggctctgggttttctgttttttgtatctcttaggattttgtaaattccagatctttctatggccacttagtagtatatttcaaaaattctccaatcgagttcttcattcgcattttcagtcattttctcttcgacgttgtttttaagcctgggtattactcctatttagttgaactctgcagcaatcttagaaaattagggttttgaggtttcgatttctctaggtaaccgatctattgcattcatctgaatttctgcatatatgtcttagatttctgataagcttacgatacgttaggtgtaattgaagtttatttttcaagagtgttattttttgtttctgaatttttcaggtggtggccaatggtgatgtcagcgttgaactgcgtgatgcggatcaacaggtggttgcaactggacaaggcactagcgggactttgcaagtggtgaatccgcacctctggcaaccgggtgaaggttatctctatcaactgtgcgtcacagccaaaagccagacagagtgtgatatctacccgcttcgcgtcggcatccggtcagtggcagtgaagggcgaacagttcctgattaaccacaaaccgttctactttactggctttggtcgtcatgaagatgcggacttgcgtggcaaaggattcgataacgtgctgatggtgcacgaccacgcattaatggactggattggggccaactcctaccgtacctcgcattacccttacgctgaagagatgctcgactgggcagatgaacatggcatcgtggtgattgatgaaactgctgctgtcggctttaacctctctttaggcattggtttcgaagcgggcaacaagccgaaagaactgtacagcgaagaggcagtcaacggggaaactcagcaagcgcacttacaggcgattaaagagctgatagcgcgtgacaaaaaccacccaagcgtggtgatgtggagtattgccaacgaaccggatacccgtccgcaaggtgcacgggaatatttcgcgccactggcggaagcaacgcgtaaactcgacccgacgcgtccgatcacctgcgtcaatgtaatgttctgcgacgctcacaccgataccatcagcgatctctttgatgtgctgtgcctgaaccgttattacggatggtatgtccaaagcggcgatttggaaacggcagagaaggtactggaaaaagaacttctggcctggcaggagaaactgcatcagccgattatcatcaccgaatacggcgtggatacgttagccgggctgcactcaatgtacaccgacatgtggagtgaagagtatcagtgtgcatggctggatatgtatcaccgcgtctttgatcgcgtcagcgccgtcgtcggtgaacaggtatggaatttcgccgattttgcgacctcgcaaggcatattgcgcgttggcggtaacaagaaagggatcttcactcgcgaccgcaaaccgaagtcggcggcttttctgctgcaaaaacgctggactggcatgaacttcggtgaaaaaccgcagcagggaggcaaacaatgagagctccgcgggcggccgcaggccgatgcgacaaccaataaaaacggatgtgacgacacagatcaagtcgcaccattagattgatcttctcctacaagagtgagactagtaattccgtgtttgtgtgctagcgtgttgaaacttttctgatgtgatgcacgcacttttaattattattaagcgttcaaggactagtatgtggtataaaaggccgtacgtgacagcctatggttatatgctgcacaaaaactacgtatggtacagtgcagtgcctgtacatttcataatttgcggtaaagtttattgactatatatccagtgtgtcaaatataataaaatgtcgaggtttaattaccatgctcatgtgcattctaggttctttatatataggagtattaggttaactgattagttgttgtacatcattgtctaaaaaaatagctgtcgttgtacataaattgagcatgctggtctgcatgaaaattaaggaaaagaaacatgcaagtagcccaggtagttgggctgtcaagcagtcgtacttgtccgagtcgcagatagttagttgacccgaaactgtgattgcgaacgtacgagcgaaaatgtagatgcaggcatttcaacttgagtgatttgctttttattcatatatatggttcattttttttaaagatggcttcgactggatctcgtcttcgttaagcatgcgtccaggaccaggagtacatgcattttgcattcagccctaaccaatactttttaccaattaaagagcagagcaggcacgacacgcatagacaacggacatggatcttcgcagtactacatttgcagtagcagtggctgataggtgaacccgatcctacatgtcagtggctgctactgtagacaatctccactgatagacaacgggtacaactcgtagtattaattcaaacgccaaatgcattaatggtagtttgcttattagtactagtttgcataacgaagcgtgtatatatatttatacttcctccgttttatgttttaatttggacttgtcgttccagaaaatcgtacgaagtcatagcaaattacattgcaattcttcttaattacatattaatcatgttttcaaagtaagaattagaattccttataagagactactactagcatggttgtgttagagaaaggtaagaagaaaaaagcatttaaaaagtgatttggaatatgagaatgacaagtgttttggcataacttttaaatggtagaacgacaagtaatttaaaacatacaaagtactagtcccttcatttcatattataattcgcttcgactttttctaagtcaaacattgttaaatttgactaggttttatagaagaaaagtaacattttaaacgtcaaattagtttcattaaatctagcatttgaatatattttgataatatgtttgttttgtggtaaaaatactattatatttttctacaaatctagtcaaacgtaaaaaaaaagtttgactaggaaaaaagtcaaaacgatttataatataaaacataagagcacccgcaatagtaaagtaaggtgctctctgtaaaacatgtacatctcagcaatagactagattaatagtaaaccaccttaatagtatgtctacttgggtatctatagctctctaatatattgcctcgtttttctctatagactatcttcacattagtagatagctttgctctcttttttcatctcttccaagtaggaaaatatgctgacatggatctcttgtagagagtttatagataaccattgtgggtgccctaagtagtactatcttttcttcctgtccaaaaaatataaagcacttttgagcttctatacgtagatttaaatgagaaatggctatatttgattgagataagtgagtaggtaaacgctctatttaagataaattgtaaagttaatatattttgacggaggggaagtagcatttatgaaaccctagtagagctacgcttcgttgaccacactcctcgaaataaacatgatattttgtcatgatcgatgactcggaccg

SEQ ID NO: 539 - DNA, 5286 bp, Artificial sequence
  OsMADS13-GUS expression cassette
  misc_feature (1)..(5286): OsMADS13-GUS expression cassette
cggaccgttccaaaattaagcacacacatttgcaagaactagctaggcatgcatatatgataattaaccggcaagttgacttcagttattctgcagatgtactaaacacataacaagggatgatcagttgcttatttttttcataacttgctaggttgcttataactccagccttctggacatcgaccaatctctaaacatactttagcagtgcctacaaagtacaaacaactaaatacctctctgcagatcagtgtttctaggcacaaattacacaagatagaaaaaaggagaggttataaattcttgcttaaagaatatacatgtaaagatgtctaaatagctataaatgggtaagcaagatagcaaagaaggccagtggcctttgcagctaagctagctagctagcccttcttcctctctttcctgctttccctttgccttctcctattaatcctctgcacctcacacagcagcagaaaacccaccaactggagctctcctttcctactccaagaaacgaaggtagagaaagaaagatcagatcagcttcaggaccaattttagctaggttatatatctctttgcgtgctaatgtgttttagttatctgggtgtgtgtagagttctttgttaaggcactgattcagctgcagtttagattcaagtttgtatgttctctctttgaggaaaagaaacccttttcctgtgcttcgagttcttgcaaagagaaactgtgatgcttggcttccagtttgatgcttctttgttcagattggaaattcttcctagcttctttctctatttatgtagcaaggattctttccggcccagtgatcctggtttcttttggaaggtttcagttttttcgttctttcttgaaatttctcttcttgccttaggcagatctttgatcttgtgaggagacaggagaaaaggaagaagctagtttcctgcggccgacctcttgcttctcactttgtgatgagttttctttggtcaattcttagctagatatgctaagatagttagttaagcaaatcgaaattgctagcttttccatgctttcttaaacatgattcttcagatttggttggttcttttttttcctttttgtggagacgtgctgttcttgcatcttatccttcttgattcatctacccatctggttctttgagctttctttttcgcttcttcccttcattatttcgagcaatctctgcacatctgaaagttttgtttcttgagactacttttgctagatcttgtttactcgatcactctatacttgcatctaggctcctttctaaataggcgatgattgagctttgcttatgtcaaatgatgggatagatattgtcccagtctccaaatttgatccatatccgccaagtctttcatcatctttttctttcttttttatgagcaaaaatcatctttttctttcaaagttcagcttttttctcttgttttacccctctttagctatagctggtttcttattccttttggatttacatgtataaaacatgcttgaatttgttagatcgatcactttatacacatactatgtgaatcacgatctcagatctctcagtatagttgaattcattaatttcttagatcgatcagcgtgtgatgtagtactgtaaatcactactagatctttcatcagtctcttttctgcatctatcaatttctcatgcaagttttagttgtttctttaatccggtctctctctcttttttaatcagctgagagtttgtgctgttctttaatcattaccagatctttcatcagtactctctcttctgcatctatcaaacttctcatgcaatgtttttgctgttctttgatctgatctctggtctccttttttgttgatcagttgagagcaagaagccatggtacgtcctgtagaaaccccaacccgtgaaatcaaaaaactcgacggcctgtgggcattcagtctggatcgcgaaaactgtggaattgatcagcgttggtgggaaagcgcgttacaagaaagccgggcaattgctgtgccaggcagttttaacgatcagttcgccgatgcagatattcgtaattatgcgggcaacgtctggtatcagcgcgaagtctttataccgaaaggttgggcaggccagcgtatcgtgctgcgtttcgatgcggtcactcattacggcaaagtgtgggtcaataatcaggaagtgatggagcatcagggcggctatacgccatttgaagccgatgtcacgccgtatgttattgccgggaaaagtgtacgtatcaccgtttgtgtgaacaacgaactgaactggcagactatcccgccgggaatggtgattaccgacgaaaacggcaagaaaaagcagtcttacttccatgatttctttaactatgccggaatccatcgcagcgtaatgctctacaccacgccgaacacctgggtggacgatatcaccgtggtgacgcatgtcgcgcaagactgtaaccacgcgtctgttgactggcaggtaccaagctgcgaatcttcgtttttttaaggaattctcgatctttatggtgtataggctctgggttttctgttttttgtatctcttaggattttgtaaattccagatctttctatggccacttagtagtatatttcaaaaattctccaatcgagttcttcattcgcattttcagtcattttctcttcgacgttgtttttaagcctgggtattactcctatttagttgaactctgcagcaatcttagaaaattagggttttgaggtttcgatttctctaggtaaccgatctattgcattcatctgaatttctgcatatatgtcttagatttctgataagcttacgatacgttaggtgtaattgaagtttatttttcaagagtgttattttttgtttctgaatttttcaggtggtggccaatggtgatgtcagcgttgaactgcgtgatgcggatcaacaggtggttgcaactggacaaggcactagcgggactttgcaagtggtgaatccgcacctctggcaaccgggtgaaggttatctctatcaactgtgcgtcacagccaaaagccagacagagtgtgatatctacccgcttcgcgtcggcatccggtcagtggcagtgaagggcgaacagttcctgattaaccacaaaccgttctactttactggctttggtcgtcatgaagatgcggacttgcgtggcaaaggattcgataacgtgctgatggtgcacgaccacgcattaatggactggattggggccaactcctaccgtacctcgcattacccttacgctgaagagatgctcgactgggcagatgaacatggcatcgtggtgattgatgaaactgctgctgtcggctttaacctctctttaggcattggtttcgaagcgggcaacaagccgaaagaactgtacagcgaagaggcagtcaacggggaaactcagcaagcgcacttacaggcgattaaagagctgatagcgcgtgacaaaaaccacccaagcgtggtgatgtggagtattgccaacgaaccggatacccgtccgcaaggtgcacgggaatatttcgcgccactggcggaagcaacgcgtaaactcgacccgacgcgtccgatcacctgcgtcaatgtaatgttctgcgacgctcacaccgataccatcagcgatctctttgatgtgctgtgcctgaaccgttattacggatggtatgtccaaagcggcgatttggaaacggcagagaaggtactggaaaaagaacttctggcctggcaggagaaactgcatcagccgattatcatcaccgaatacggcgtggatacgttagccgggctgcactcaatgtacaccgacatgtggagtgaagagtatcagtgtgcatggctggatatgtatcaccgcgtctttgatcgcgtcagcgccgtcgtcggtgaacaggtatggaatttcgccgattttgcgacctcgcaaggcatattgcgcgttggcggtaacaagaaagggatcttcactcgcgaccgcaaaccgaagtcggcggcttttctgctgcaaaaacgctggactggcatgaacttcggtgaaaaaccgcagcagggaggcaaacaatgagagctccgcgggcggccgctgacatggatatgatgatcagctcatcttctatatcttatgctgttatgcagacagacactactgatgtggctatatatatagtatttgtgtgctgctgcattttgttaatcccttataaattgctacttaattatctcatggagaattggagagaccaaatgggcagagctagctagttagctgtgcccaattaagaagctaaatctatcagaagtgtgtactgatgagtgatgagtatttttcttcatttgggatcaaattaaactaagtaaaacatatatatttgacttatgttttacgtgcatgcatgcatgcttaattgtgtcacctttggggattcattttgtacatatgtgcaccattttgtgtgtacaatgcaggtttatatgacttttttcgcaattacacgatggcccatgcacataaccaccatgcacactgcacgtacatccacaagtgtgcccctttaacacaaggcaatacaccaaataaattgtaatgtgccactaaacttttttgaaagtgtaaccgcgcgtatgcttccgtggcttatatatgactctggtggctgacttctagggcatgtcgacctgagcatcttcgtgtgggtttcgactctctaattctcctggtctctggcagttgtggaaggggcgaaactccagggtttttgattactctctttcctcactctcaagggttctgaaagtcatcctacaggaagaccgtttgtggtcttctgctggcgtcgctgtttttaggggtttattaggagtgtagtggagcttcgccaccaccctccatctatttaggagcaacatttttttggtagttttttactttagcagtctttttgtttctttctttgttcccttatccacatgcaatggtcgtctgactggttacgttgtgtaacaaaaactctgcttttttctaatatactgacgtgcaatcctttggtgcgttcgcgaaaagaaagggggatcaattgcaagtattttgtgggaattaaacttttcttgtgaaattattgtaaaattccagcattctaaatgagctctaatgtgtgataatttgcattctctatatatattgaataattcttttgttgactagttgggtgcccgtgcgttgcggaccg

1) An expression cassette for expression nucleic acid molecule product in the reproductive tissue of a plant comprising:
a) a promoter, a first exon; a first intron, and a second exon of a MADS gene, wherein said promoter, first exon, intron, and second exon are the 5′-regulatory sequence of said expression cassette; wherein said 5′-regulatory sequence has been engineered to include a translational initiation codon at approximately the 3′ end of said 5′-regulatory sequence, and not to contain restriction endonuclease sites that hinder manipulation by recombinant DNA methods or additional translation initiation codons upstream of said translation initiation codon;
b) a 3′-regulatory sequence of a MADS gene; and
c) a nucleic acid molecule operably linked to said 5′-regulatory sequence and said 3′-regulatory sequence.

2) The expression cassette of claim 1, wherein the product of said nucleic acid molecule when expressed in a plant makes said plant abiotic stress tolerant.

3) The expression cassette of claim 1, wherein when expressed in a plant the product of said nucleic acid molecule increases the sink strength in said reproductive tissue of said plant.

4) The expression cassette of claim 3, wherein said nucleic acid is a molecule selected from the group consisting of a sucrose transporter gene, an invertase gene and a trehalose metabolism gene.

5) (canceled)

6) The expression cassette of claim 3, wherein said nucleic acid molecule is a RNA interference molecule directed against an invertase gene or a trehalose metabolism gene.

7) The expression cassette of claim 4, wherein said nucleic acid molecule is a T6PP gene.

8) The expression cassette of claim 6, wherein said nucleic acid molecule is depicted by SEQ ID NO. 531.

9) The expression cassette of claim 1, wherein said expression cassette is depicted by SEQ ID NO. 532.

10) The expression cassette of claim 1, wherein said expression cassette is depicted by SEQ ID NO. 536, 537, 538, or 539.

11) The expression cassette of claim 2, wherein said nucleic acid molecule is a trehalose metabolism gene.

12) The expression cassette of claim 2, wherein said nucleic acid molecule is a RNA interference molecule directed against a trehalose metabolism gene.

13) A recombinant vector comprising the expression cassette of claim 1.

14) A transgenic plant cell comprising the expression cassette of claim 1.

15) A transgenic plant comprising the transgenic plant cell of claim 14.

16) A transgenic plant according to claim 15, wherein said plant is a monocot plant.

17) A transgenic plant according to claim 15, wherein said plant is a maize plant.

18) A transgenic plant according to claim 15, wherein said plant is a rice plant.

19) Seed from the transgenic plant of claim 15.

20) Seed from the transgenic plant of claim 16.

21) Seed from the transgenic plant of claim 17.

22) Seed from the transgenic plant of claim 18.

23) Plants containing the expression cassette according to claim 1.

24) An expression cassette comprising a 5′-regulatory sequence selected from the group consisting of SEQ ID NOS. 6, 12, 20, 28, 506, 34, 39, 43, 47, 51, 55, 59, 63, 67, 71, 75, 79, 83, 87, 91, 95, 99, 103, 107, 111, 115, 119, 123, 127, 131, and 526 and a 3′-regulatory sequence selected from the group consisting of SEQ ID NOS. 10, 16, 24, 30, 507, 36, 40, 44, 48, 52, 56, 60, 64, 68, 72, 76, 80, 84, 88, 92, 96, 100, 104, 108, 112, 116, 120, 124, 128, 132, and 527.

25) A method of constructing an expression cassette comprising the steps of:
a) selecting a target gene;
b) identifying the open reading frame on said target gene cDNA;
c) identifying the positions of the translational start codon, translational stop codon, the first intron, first exon, second exon, the 3′untranslated sequence and the 3′nontranscribed sequence of said target gene gDNA by using the cDNA to annotate said target gene gDNA;
d) constructing a 5′-regulatory sequence comprising said promoter, first exon, first intron, and second exon and a 3′-regulatory sequence comprising the 3′-untranslated sequence and the 3′-nontranscribed sequence; and
e) operably linking a nucleic acid molecule to said 5′-regulatory sequence and said 3′regulatory sequence of said expression cassette, wherein said nucleic acid molecule is expressed in a manner that mimics the expression of said target gene.

26) The method of constructing an expression cassette according to claim 25, wherein said target gene is a MADS gene.

27) The method of constructing an expression cassette according to claim 25, wherein said nucleic acid molecule is a sucrose transporter gene.

28) A method of constructing an expression cassette according to claim 25, wherein said nucleic acid molecule is an invertase gene.

29) A method of constructing an expression cassette according to claim 25, wherein said nucleic acid molecule is a trehalose metabolism gene.

30) A method of constructing an expression cassette according to claim 29, wherein said trehalose metabolism gene is a trehalose-phosphate synthase gene, a trehalose-6-phosphate phosphatase gene or trehalase gene.

31) A method of constructing an expression cassette according to claim 28, wherein said invertase gene is a soluble acid invertase gene, a soluble neutral invertase gene or an insoluble acid invertase gene.

32) The method of constructing an expression cassette according to claim 25, further comprising the step of engineering a translational initiation codon at approximately the 3′ end of said 5′ regulatory sequence.

33) The method of constructing an expression cassette according to claim 25, further comprising the step of engineering said expression cassette to not contain restriction endonuclease sites that hinder manipulation by recombinant DNA methods or additional translation initiation codons upstream of said translation initiation codon.

34) A method of conferring abiotic stress tolerance to a plant comprising the steps of constructing an expression cassette comprising 5′-regulatory and 3′-regulatory sequences of the MADs gene family.

35) A method of constructing an expression cassette according to claim 25, wherein said 5′ regulatory sequence is selected from the group consisting of SEQ ID NOS. 6, 12, 20, 28, 506, 34, 39, 43, 47, 51, 55, 59, 63, 67, 71, 75, 79, 83, 87, 91, 95, 99, 103, 107, 111, 115, 119, 123, 127, 131, and 526.

36) A method of constructing an expression cassette according to claim 25, wherein said 3′-regulatory sequence is selected from the group consisting of SEQ ID NOS. to, 16, 24, 30, 507, 36, 40, 44, 48, 52, 56, 60, 64, 68, 72, 76, 80, 84, 88, 92, 96, 100, 104, 108, 112, 116, 120, 124, 128, 132, and 527.

37) A method of constructing an expression cassette according to claim 25, wherein said target gene is selected based on its expression data.

38) A maize plant expressing a trehalose 6 phosphate phosphatase gene under the control of a promoter, a first exon; a first intron; and a second exon of a MADS gene.
